(19) United States
(12) Patent Application Publication
(10) Pub. No.: US 2025/0268982 A1
(43) Pub. Date: Aug. 28, 2025

(54) COMPOSITIONS AND METHODS FOR TREATMENT AND/OR PROPHYLAXIS OF PROTEINOPATHIES

(71) Applicant: REGAIN THERAPEUTICS SWEDEN AB, Stockholm (SE)

(72) Inventors: Kariem Ezzat Ahmed, Stockholm (SE); Andrea STURCHIO, Imperia (IT); Alberto ESPAY, Cincinnati, OH (US); Tarja MALM, Siilinjarvi (FI); Samir EL ANDALOUSSI, Stockholm (SE); Joel NORDIN, Stockholm (SE)

(73) Assignee: REGAIN THERAPEUTICS SWEDEN AB, Stockholm (SE)

(21) Appl. No.: 18/563,420

(22) PCT Filed: May 26, 2022
(86) PCT No.: PCT/EP2022/064374

§ 371 Date: Nov. 22, 2023

Related U.S. Application Data
(60) Provisional application No. 63/193,258, filed on May 26, 2021.

(51) Int. Cl. A61K 38/17; A61P 25/28

(52) U.S. Cl. CPC A61K 38/1716; A61P 25/28

(57) ABSTRACT

Non-aggregating protein analogues of proteins involved in a proteinopathy, for example Alzheimer's disease, are provided. The protein has a beta-sheet aggregation domain, and the non-aggregating protein analogue has a beta-sheet destabilizing modification in the beta-sheet aggregation domain but substantially retains wild type protein function. The beta-sheet destabilizing modification can be a substitution of a naturally occurring amino acid for a non-naturally occurring amino acid. Methods of treating a proteinopathy using the non-aggregating protein analogues and methods of designing a non-aggregating protein analogue are provided.

### CROSS-REFERENCE TO RELATED APPLICATIONS

[0001] This application claims priority to, and the benefit of, U.S. provisional patent application No. 63/193,258 filed 26 May 2021, which is incorporated by reference herein in its entirety.

### TECHNICAL FIELD

[0002] Some aspects relate to compositions for preventing aggregation of proteins in proteinopathies. Some aspects relate to compositions for supplying the native function of a protein while limiting and/or preventing aggregation of said protein in vivo. Some aspects relate to compositions and/or methods useful for the treatment and/or prophylaxis of proteinopathies.

### BACKGROUND

[0003] Amyloids are fibrillary protein aggregates formed when certain proteins transition from a natively folded conformation to a cross-beta conformation. In this conformation, the protein molecules are arranged in the form of two oppositely stacked beta-sheets that exclude water molecules between them and have interdigitating generally hydrophobic side chains forming a dry steric zipper. This elongated cross-beta conformation constitutes the basic amyloid fibrillary subunit, the protofilament. The cross-beta architecture can be provided by one folded molecule or two separate molecules, and the beta-sheets can stack in parallel, anti-parallel, face-to-face, or face-to-back orientations.

[0004] The protofilaments once formed can associate in a number of different ways to produce different superstructural polymorphs associated with various disorders, including flat fibrillary structures with varied numbers of horizontally stacked protofilaments. These flat fibrillary structures can evolve to amyloid crystals or different twisted ribbon structures of single or multiple intertwined protofilaments, which can further evolve into nanotubes.

[0005] A number of disorders have been determined to be amyloid-associated diseases or amyloidopathies, which can be more generally referred to as proteinopathies, including Alzheimer's disease (AD), Parkinson's disease, Lewy body disease, Pick's disease, transmissible spongiform encephalopathies (TSEs) caused by prions such as Creutzfeldt-Jakob disease or Kuru, Huntington's disease, type II diabetes, thyroid medullary carcinoma, pulmonary alveolar proteinosis and atrial amyloidosis resulting from the amyloid accumulation of calcitonin, surfactant protein C and atrial natriuretic factor, amyotrophic lateral sclerosis, Down syndrome, multiple system atrophy, neuronal degeneration with brain iron accumulation type I (Hallervorden-Spatz disease), mild cognitive impairment (MCI), cerebral amyloid angiopathy (CAA), and the like. Examples of proteinopathies include tauopathies, synucleinopathies, prionopathies, TDP-43, and the like. Examples of tauopathies include: Pick's disease, progressive supranuclear palsy, corticobasal degeneration, argyrophilic grain disease, globular glial tauopathies, aging-related tau astrogliopathy, chronic traumatic encephalopathy, primary age-related tauopathy (PART) (or tangle dominant dementia), Parkinsonism-Dementia complex of Guam, postencephalitic Parkinsonism, atypical Parkinsonism of Guadeloupe, diffuse neurofilament tangles with calcification, frontotemporal dementia, Parkinsonism linked to Chromosome tauopathy, and the like. Examples of synucleinopathies include: Parkinson's disease with dementia, pure autonomic failure (PAF), multiple systemic atrophy (MSA), and the like. Examples of prionopathies include fatal familial insomnia (FFI), Gerstmann-Straussler-Scheinker (GSS), and the like. Examples of TDP-43 include: frontotemporal lobar degeneration (FTLD) with TDP43 inclusion, FTLD with moto-neurons disease (FTLD-MND), hippocampal sclerosis, amyotrophic lateral sclerosis, frontotemporal dementia, Parkinsonism liked to Chromosome 17 3R, 4R, or 3R+4R tauopathy, or the like.

[0006] Exemplary proteins that are known to be involved in proteinopathies include amyloid-beta protein (Alzheimer's disease), alpha-synuclein (Parkinson's disease), islet amyloid polypeptide (IAPP, type II diabetes), tau (a microtubule-associated protein implicated in frontal temporal dementia with Parkinsonism and Pick's disease), p53 (a tumor suppressor transcription factor, implicated in many cancers), huntingtin protein in Huntington's disease, prion protein in Creutzfelt-Jakob disease, and the like. Table 1 below lists exemplary proteinopathies and the proteins known to be implicated or involved in such proteinopathies.

TABLE 1
Known proteinopathies and the corresponding
protein implicated in the proteinopathy.

| | |
|---|---|
| Alzheimer's disease | amyloid-beta |
| Hereditary cerebral hemorrhage with | amyloid-beta |
| amyloidosis | |
| Parkinson's disease | alpha-synuclein |
| Lewy body dementia | alpha-synuclein |
| Parkinson's disease with dementia | alpha-synuclein |
| Multiple system atrophy | alpha-synuclein |
| Pick's disease | tau protein |
| Progressive supranuclear palsy | tau protein |
| Corticobasal degeneration | tau protein |
| Frontotemporal dementia with | tau protein |
| parkinsonism linked to chr 17 | |
| Argyrophyilic grain disease | tau protein |
| Tangle predominant dementia | tau protein |
| Guam Parkinson dementia comples | tau protein |
| Frontotemporal lobar degeneration | tau protein |
| Chronic traumatic encephalopathy | tau protein |
| Ganglioglioma | tau protein |
| Meningioangiomatosis | tau protein |
| Subacute sclerosing panencephalitis | tau protein |
| Lead encephalopathy | tau protein |
| Tuberous sclerosis | tau protein |
| Hallervorden-Spatz disease | tau protein |
| Lipofuscinosis | tau protein |
| Spongiform encephalopathy including | prion protein (PrP) |
| Creutzfelt-Jakob disease | |
| Fatal insomnia | prion protein (PrP) |
| Gerstmann-Strässler-Scheinker | prion protein (PrP) |
| disease | |
| Huntington disease-like 1 | prion protein (PrP) |
| Spongiform encephalopathy with | prion protein (PrP) |
| neuropsychiatric features | |
| New variant Creutzfelt-Jakob disease | prion protein (PrP) |
| Kuru | prion protein (PrP) |
| Hereditary sensory and autonomic | prion protein (PrP) |
| neuropathy | |
| Type 2 diabetes | Fragments of islet amyloid polypeptide |
| Insulinoma | Islet amyloid polypeptide |
| Primary systemic amyloidosis | Immunoglobulin light chain or fragments |
| | thereof |
| Secondary systemic amyloidosis | Fragments of serum amyloid-A |
| Senile systemic amyloidosis or familial | Transthyretin and fragments thereof |
| amyloid polyneuropathy | |
| Hemodialysis-related amyloidosis | Beta2-microglobulin |
| Hereditary cerebral amyloid | Cystain C |
| angiopathy, Icelandic type | |
| Familial amyloidosis, Finnish type | Gelsolin fragments |
| Familial amyloid polyneuropathy | Fragments of apolipoprotein A-1 |
| Medullar carcinoma of the thyroid | Fragments of calcitonin |
| Atrial amyloidosis | Atrial natriuretic factor |
| Hereditary non-neuropathic systemic | Lysozyme or fragments thereof |
| amyloidosis | |
| Hereditary renal amyloidosis | Fibrinogen fragments |
| Amyloidosis in senescence | Apolipoprotein A-Il |
| Huntingtin disease | Huntingtin |
| Familial British dementia | ABri peptide |
| Familial Danish dementia | ADan peptide |
| Light-chain amyloidosis | Fragments of immunoglobulin light chains |
| Heavy-chain amyloidosis, including | Fragments of immunoglobulin heavy |
| renal | chains |
| AA amyloidosis | Full or N-terminal fragments of serum |
| | amyloid A protein (SAA) |
| Senile systemic amyloidosis | Transthyretin (TTR) |
| Familial amyloidotic polyneuropathy | Transthyretin (TTR) |
| Familial amyloid cardiomyopathy | Transthyretin (TTR) |
| Leptomeningeal amyloidosis | Transthyretin (TTR) |
| Dialysis-related amyloidosis | β₂-microglobulin |
| Hereditary visceral amyloidosis | β₂-microglobulin |
| ApoAI amyloidosis, including in | N-terminal fragments of apolipoprotein A-I |
| various organs | (ApoAI) |
| ApoAII amyloidosis, including renal | C-terminal extended apolipoprotein A-Il |
| | (ApoAII) |
| ApoAIV amyloidosis, including in | N-terminal fragments of apolipoprotein A- |
| various organs | IV (ApoAIV) |
| ApoCII amyloidosis, including renal | Apolipoprotein C-II (ApoCII) |
| ApoCIII amyloidosis, including renal | Apolipoprotein C-III (ApoCIII) |
| Lysozyme amyloidosis, including | Lysozyme |
| visceral | |
| Fibrinogen amyloidosis, including | Fragments of fibrinogen alpha-chain |
| renal | |
| Hereditary cerebral hemorrhage with | N-terminal truncated cystatin C |
| amyloidosis, Icelandic type | |
| Pituitary prolactinoma | N-terminal fragments of prolactin |
| Aortic medial amyloidosis | Medin |
| Gelatinous drop-like corneal dystrophy | Lactotransferrin (lactoferrin) |
| Calcifying epithelial odontogenic | Odontogenic ameloblast-associated |
| tumors | protein (ODAM) |
| Pulmonary alveolar proteinosis | Pulmonary surfactant-associated protein |
| | C (SP-C) |
| Renal amyloidosis | Leukocyte cell-derived chemotaxin-2 |
| | (LECT-2) |
| Lichen amyloidosis | Galectin 7 (Gal-7) |
| Macular amyloidosis | Galectin 7 (Gal-7) |
| Hypotrichosis simplex of the scalp | Corneodesmosin (CDSN) |
| Lattice corneal dystrophy, type 1 | C-terminal fragments of kerato-epithelin |
| Lattice corneal dystrophy, type 3A | C-terminal fragments of kerato-epithelin |
| Lattice corneal dystrophy, Avellino | C-terminal fragments of kerato-epithelin |
| type | |
| Seminal vesicle amyloidosis | Semenogelin-1 (SGI) |
| Prostate cancer | Proteins S100A8/A9 |
| Injection-localized amyloidosis | Enfuvirtide |
| Cerebral autosomal dominant | Neurogenic locus notch homolog protein |
| arteriopathy with subcortical infarcts | 3 (Notch 3) ectodomain |
| and leukoencephalopathy (CADASIL) | |
| Heavy-chain deposition disease, | Immunoglobulin heavy chains |
| including renal | |
| Light-chain deposition disease, | Immunoglobulin light chains |
| including renal | |
| Myeloma cast nephropathy, renal | Immunoglobulin light chains |
| Fanconi syndrome, renal | Immunoglobulin light chains |
| FN glomerulopathy | Fibronectin (FN) |
| Frontotemporal lobar degeneration | TAR DNA-binding protein 43 (TDP-43) |
| with ubiquitin-positive inclusions | |
| Amyotrophic lateral sclerosis | TAR DNA-binding protein 43 (TDP-43) |
| Frontotemporal lobar degeneration | RNA-binding protein FUS (FUS) |
| with ubiquitin-positive inclusions | |
| Amyotrophic lateral sclerosis | RNA-binding protein FUS (FUS) |
| Amyotrophic lateral sclerosis | [Cu-Zn] superoxide dismutase (SOD1) |
| Amyotrophic lateral sclerosis | C9ORF72 protein |
| C1q nephropathy | Complement C1q subcomponent |
| IgA nephropathy (Berger disease) | Immunoglobulin A (IgA) |
| Henoch-Schönlein purpura | Immunoglobulin A (IgA) |
| Primary hyperoxaluria type 1 | Alanine:glyoxylate aminotransferase |
| | (AGT) |
| Multiple myeloma/plasmacytoma | Immunoglobulin G (lgG) |
| (Russell bodies) | |
| Medullary cystic kidney disease 2 | Uromodulin, or Tamm-Horsfall urinary |
| | glycoprotein (THP) |
| Familial juvenile hyperuricemic | Uromodulin, or Tamm-Horsfall urinary |
| nephropathy | glycoprotein (THP) |
| Glomerulocystic kidney disease | Uromodulin, or Tamm-Horsfall urinary |
| | glycoprotein (THP) |
| Spinocerebellar ataxia 1 | Ataxin-1 |
| Sickle cell anemia | Hemoglobin |
| Heinz body anemia | Hemoglobin |
| Inclusion body β-thalassemia | Hemoglobin |
| α1-antitrypsin deficiency | α1-antitrypsin |
| Heredeitary hyperferritinemia cataract | Ferritin light chain |
| syndrome | |
| Alzheimer's disease | Actin |
| Frontotemporal dementia | Actin |
| Cancer | Cellular tumor antigen p53 |

[0007] Amyloid-beta peptide is a 39-43 amino acid peptide that is derived by proteolysis from amyloid precursor protein (APP). Amyloid precursor protein (APP) is cleaved by a β-secretase to produce a 99-residue transmembrane fragment C99, which then undergoes further cleavages by γ-secretase to generate the amyloid-beta peptide. The predominant circulating form of amyloid-beta protein is Aβ-40, although Aβ-42 and Aβ-43 are also found in amyloid-beta plaques. The function of amyloid-beta protein is not well understood, but it does appear to play a role in normal synaptic plasticity and memory. A growing body of literature demonstrates the role of Aβ peptides in memory and synaptic plasticity via alpha-7 nicotinic acetylcholine receptor signaling.

[0008] Considering Alzheimer's disease as an example proteinopathy, there are numerous different types and causes of Alzheimer's disease. Alzheimer's disease can include Alzheimer's disease arising from any cause or of any other type, including familial Alzheimer's disease (also called autosomal dominant Alzheimer's disease), sporadic Alzheimer's disease, or early-onset sporadic Alzheimer's disease. Apart from being a condition on its own right, mild cognitive impairment may be regarded as an early stage of Alzheimer's disease. Thus, the emergence of mild cognitive impairment may signal the need for initiating therapy to avoid progression to the more profound cognitive impairment typical for Alzheimer's disease. In other words, subjects with mild cognitive impairment are at increased risk of Alzheimer's disease.

[0009] A subset of familial Alzheimer's disease cases are caused by specific genetic defects in the presenilin 1 (PSEN1), presenilin 2 (PSEN2) or amyloid-β protein precursor (APP) genes. PSEN1 functions as the catalytic subunit of γ-secretase while mutations in PSEN2 may increase γ-secretase activity. It has been established by numerous studies that the level of soluble Aβ42 in various types of familial Alzheimer's disease, including that caused by mutations in PSEN1, PSEN2 or APP, begins to decline many years before disease onset. Thus, a decrease in soluble levels of Aβ42 is associated with Alzheimer's disease, and occurs long before the disease develops.

[0010] A subset of familial Alzheimer's disease is caused by mutations in the Aβ-42 peptide, particularly at residues 19-24 of the peptide. Further, it is believed that the YEVHHQ domain at residues 10-15 of the Aβ42 peptide is also important for native function of the peptide.

[0011] In addition to Alzheimer's disease, a decrease in soluble Aβ42 peptide has also been identified in other disorders, including Amyotrophic lateral sclerosis (ALS), frontotemporal dementia, Parkinson's disease, Parkinson's disease dementia, progressive supranuclear palsy, corticobasal degeneration, dementia with Lewy bodies, multiple system atrophy, and neurogenerative dementias. See e.g. Millenhauer et al., J. Neurochem. (2016) 139 (Suppl. 1), 290-317, which is incorporated by reference herein in its entirety.

[0012] Alpha-synuclein is a protein that is abundant in the brain, and which is found mainly at the tips of neurons in presynaptic terminals. The function of alpha-synuclein is not well understood, but it is believed to play a role in synaptic vesicle recycling and it may also help to regulate the release of dopamine. Patients with Parkinson's disease or Lewy body dementia generally develop Lewy bodies, which are aggregations of alpha-synuclein, in their brains.

[0013] Prion protein is a cellular glycoprotein that has been implicated in Creutzfeldt-Jakob disease. Soluble prion protein in its native conformation is believed to be involved in myelin maintenance and cellular proliferation processes.

[0014] Conventional wisdom suggests that many of the disease states caused by proteinopathies are caused by a toxic gain of function of the proteins involved as they aggregate. Most conventional therapies are aimed at minimizing protein aggregation or removing the aggregated proteins (e.g. by reducing protein expression, or by techniques such as immunotherapy aimed at clearing aggregated proteins from cells). However, such therapies have not been particularly successful, and in some cases halting expression of the protein involved in the proteinopathy (for example by knocking out or knocking down the relevant protein) can actually result in a disease phenotype even in the absence of the relevant protein and its aggregated forms. Further, for example in Alzheimer's disease, it has been shown that there is not always a correlation between plaque load and disease severity.

[0015] There is emerging evidence that the disease states caused by proteinopathies may in fact be caused by the loss of function of the native proteins that become aggregated in such diseases, particularly in earlier stages of disease. Most amyloid-forming proteins are known or suspected to perform various functions in their native folded state. As such proteins unfold into a cross-beta conformation and form fibrils, the native function of the protein may be lost. Such loss of function of the protein can have deleterious effects on cells that are at least part of the disease process.

[0016] There is a general desire for improved therapeutics for proteinopathies. There is a desire for improved therapeutics for disorders involving proteinopathies that can address loss-of-function of the native protein.

[0017] The foregoing examples of the related art and limitations related thereto are intended to be illustrative and not exclusive. Other limitations of the related art will become apparent to those of skill in the art upon a reading of the specification and a study of the drawings.

### SUMMARY

[0018] The following embodiments and aspects thereof are described and illustrated in conjunction with systems, tools and methods which are meant to be exemplary and illustrative, not limiting in scope. In various embodiments, one or more of the above-described problems have been reduced or eliminated, while other embodiments are directed to other improvements.

[0019] Some aspects provide a non-aggregating peptide analogue of the Aβ42 peptide. The Aβ42 peptide has an N-terminal domain corresponding to positions 1-28 of SEQ ID NO: 1, and a beta-sheet aggregation domain corresponding to positions 29-42 of SEQ ID NO: 1. The non-aggregating peptide analogue has a beta-sheet destabilizing modification in the beta sheet aggregation domain, and substantially retains the native function of the Aβ42 peptide except for being non-aggregating. In some aspects, the non-aggregating peptide analogue is for use in the treatment and/or prophylaxis of Alzheimer's disease or mild cognitive impairment or another disorder associated with a decreased level of soluble Aβ42 peptide. In some aspects, a method of screening a subject to determine if the subject is a candidate for the treatment and/or prophylaxis of Alzheimer's disease or another disorder associated with a decreased level of soluble Aβ42 peptide using a non-aggregating peptide analogue as disclosed herein is provided. The concentration of Aβ42 in a sample of cerebrospinal fluid of the subject is determined, and if the measured concentration of Aβ42 in the cerebrospinal fluid sample is less than about 500 pM, preferably less than about 400 pM, preferably less than about 300 pM, more preferably less than 200 pM, the subject is identified as a candidate for treatment and/or prophylaxis via the administration of a non-aggregating peptide analogue as described herein. In some aspects, the method further comprises administering the non-aggregating peptide analogue to the subject.

[0020] In addition to the exemplary aspects and embodiments described above, further aspects and embodiments will become apparent by reference to the drawings and by study of the following detailed descriptions.

### BRIEF DESCRIPTION OF THE DRAWINGS

[0021] Exemplary embodiments are illustrated in referenced figures of the drawings. It is intended that the embodiments and figures disclosed herein are to be considered illustrative rather than restrictive.

[0022] FIG. 1, having panels 1.1, 1.2, 1.3, 1.4, 1.5 and 1.6, shows exemplary engineered proteins having a beta-sheet destabilizing mutation in the beta-sheet aggregation domain of the amyloid-beta protein. The presence of a blank shaded block in the table indicates a deletion mutation.

[0023] FIG. 2 shows an example embodiment of a method for designing a non-aggregating analogue of a protein implicated in a proteinopathy.

[0024] FIG. 3 shows an example embodiment of an engineered protein that is a non-aggregating analogue of a protein implicated in a proteinopathy.

[0025] FIG. 4A shows the restoration of phenotype in the Alzheimer's disease animal model 5XFAD demonstrating that administration of an engineered peptide intravenously restored wild type behaviour when administered for five weeks. FIGS. 4B and 4C show parallel results from additional experiments.

[0026] FIG. 5A shows the relative plaque load in the cortices of vehicle treated (left side) 5XFAD mice as compared with 5XFAD mice treated for five weeks with an engineered peptide that is a non-aggregating analogue of Aβ42. FIG. 5B shows the corresponding level of plaque accumulation in the hippocampi of the mice.

[0027] FIG. 6A shows the aggregation propensity of Aβ42 peptide and two non-aggregating analogues thereof, as measured using a thioflavin-T kinetics assay. FIG. 6B shows the aggregation propensity of Aβ42 peptide and two additional exemplary non-aggregating analogues thereof incorporating a non-naturally occurring amino acid substitution.

[0028] FIG. 7A and FIG. 7B show results of assays on SH-SY5Y neuronal cell-line expressing amyloid precursor protein gene with the Swedish mutations. FIG. 7A shows cell proliferation relative to untreated cells, while FIG. 7B shows cell proliferation relative to wild type cells. FIGS. 7C and 7D show data from additional similar experiments showing cell proliferation over untreated cells plotted along a shorter γ-axis to better show comparisons.

[0029] FIG. 8 shows results of assays on SH-SY5Y neuronal cells that were treated with 10 μM of γ-secretase inhibitor.

[0030] FIGS. 9A and 9B show the levels of soluble Aβ42 that differentiate healthy individuals (cognitively normal or CN) from those with mild cognitive impairment (MCI) or Alzheimer's disease (AD).

[0031] FIG. 10 shows adjusted prediction of CDR non-progression with baseline CSF Aβ42 levels.

[0032] FIG. 11A-11D shows the percentage of facilitation of α7 nicotinic acetylcholine receptors in cortical neurons in comparison with pre- and post-control responses for an example non-aggregating peptide analogue.

[0033] FIGS. 12A-12D and 13 show the percentage of facilitation of α7 nicotinic acetylcholine receptors in cortical neurons in comparison with pre- and post-control responses for additional example non-aggregating peptide analogues.

[0034] FIG. 14 shows the percentage facilitation of α7 nicotinic acetylcholine receptors in cortical neurons in comparison with pre- and post-control responses for Aβ42.

[0035] FIGS. 15A-15D show the percentage of facilitation of α7 nicotinic acetylcholine receptors in cortical neurons in comparison with pre- and post-control responses for a control scrambled peptide.

[0036] FIG. 16 shows that RT88 induces downstream ERK1/2 phosphorylation at pM concentrations.

[0037] FIG. 17 shows docking simulations showing that an exemplary non-aggregating peptide analogue of Aβ42 binds to the α7 nicotinic acetylcholine receptor via its N-terminal domain.

[0038] FIG. 18 shows a model of the formation of intermolecular beta-sheets, with the position occupied by the methionine at position 35 circled.

### DESCRIPTION

[0039] Throughout the following description specific details are set forth in order to provide a more thorough understanding to persons skilled in the art. However, well known elements may not have been shown or described in detail to avoid unnecessarily obscuring the disclosure. Accordingly, the description and drawings are to be regarded in an illustrative, rather than a restrictive, sense.

[0040] The inventors have now determined that administration of engineered peptides/proteins that provide the beneficial wild type function of a peptide/protein implicated in a proteinopathy but which have been modified to avoid or minimize the formation of a cross-beta sheet structure can be therapeutic and/or prophylactic for the proteinopathy. Without being bound by theory, the administration of such proteins is believed to provide equivalent or similar function to the native protein, to address the loss of function of such protein that is believed to be caused by the proteinopathy, without contributing further to aggregation of the protein.

[0041] As used herein, the term “engineered peptide” may be used interchangeably with the term “engineered protein”, it being understood by those skilled in the art that both peptides and proteins are made up of amino acids joined by peptide bonds, with proteins being longer chains of amino acids than peptides. The protein involved in a proteinopathy may sometimes be a peptide, and so a reference to protein involved in a proteinopathy also encompasses a peptide involved in a proteinopathy.

[0042] As used herein, amino acid sequences for peptides are provided, including a numbering of the positions of each amino acid residue within that sequence, for example positions 1-42 of the Aβ42 peptide (SEQ ID NO: 1). It will be recognized by those skilled in the art that for corresponding peptide analogues, if one or more amino acid residues are deleted, the notional numbering of the positions of the peptide will change, for example if the first residue of the Aβ42 peptide is deleted in a particular peptide analogue, that particular analogue will have only residues 1-41. As used herein, the term “corresponding” when referring to the numbering of the position of an amino acid within a peptide sequence refers to the numbering of the consensus sequence of the peptide as provided herein, and so refers to the corresponding numbering of the amino acid residue relative to the reference sequence when the two peptide sequences are aligned. Thus, the particular analogue in which the first residue of the Aβ42 peptide mentioned above will contain amino acid residues corresponding to residues 2-42 if the Aβ42 peptide as described herein.

[0043] As used herein, the term “beta-sheet aggregation domain” refers to a domain of a peptide or protein that is involved in the formation of a cross-beta conformation of the protein that is implicated in a proteinopathy. While the beta-sheet aggregation domain may not in healthy subjects be associated with the formation of a beta-sheet structure or with aggregation, in individuals suffering from or developing proteinopathies, the collective intra- and inter-molecular interactions of the beta-sheet aggregation domain result in the formation of cross-beta sheets that contribute to the formation of amyloid deposits of the protein or peptide. For the Aβ42 peptide, the beta-sheet aggregation domain is located at positions corresponding to residues 29-42 of SEQ ID NO: 1.

[0044] The terms “treat”, “treating” and “treatment” refer to an approach for obtaining desired clinical results. Desired clinical results can include, but are not limited to, reduction or alleviation of at least one symptom of a disease. For example, treatment can be diminishment of at least one symptom of disease, diminishment of extent of disease, stabilization of disease state, prevention of spread of disease, delay or slowing of disease progression, palliation of disease, diminishment of disease reoccurrence, remission of disease, prolonging survival with disease, or complete eradication of disease. The term “prophylaxis” includes an approach for preventing disease from occurring or developing from an early stage to a later stage. The term “prevention” in the present context refers to preventive measures resulting in any degree of reduction in the likelihood of developing the condition to be prevented, including a minor, substantial or major reduction in likelihood of developing the condition as well as total prevention. Preferably, the degree of likelihood reduction is at least a minor reduction.

[0045] As used herein, the term proteinopathy is used to refer to a disease or disorder caused by the aggregation of a protein or peptide into a cross-beta sheet structure that facilitates the formation of fibrillary aggregates of the protein or peptide. Examples of proteinopathies include amyloidopathies, synucleopathies, tauopathies, and the like.

[0046] As used herein, the term “naturally occurring amino acid residue” includes not only the wild type amino acid residue typically found at a particular position within a protein or peptide, but also a mutant amino acid that may occur at that particular position in particular disorders or in an individual subject with a genetic mutation that causes a difference in amino acid sequence at that particular position. An “amino acid analogue” is any non-naturally occurring analogue of a naturally occurring amino acid residue, whether produced synthetically or in vivo via post-translational modification. A non-naturally occurring amino acid analogue may be an analogue that comprises an amino acid. Alternatively, an amino acid analogue may also be devoid of an amino acid moiety, i.e. the non-naturally occurring analogue may comprise any chemical moiety that can be incorporated into an engineered peptide as long as the engineered peptide maintains its native function with the exception of being non-aggregating.

[0047] As used herein, amino acid residues are represented with their one-letter code as follows: alanine (A), arginine (R), asparagine (N), aspartic acid (D), cysteine (C), glutamic acid (E), glutamine (Q), glycine (G), histidine (H), isoleucine (I), leucine (L), lysine (K), methionine (M), phenylalanine (F), proline (P), serine(S), threonine (T), tryptophan (W), tyrosine (Y), valine (V). Unless further specified, all references to amino acid residues herein are to the L-amino acids normally produced by eukaryotes. In some alternative embodiments, the corresponding D-amino acids could be used in place of some or all of the corresponding L-amino acids, including within the beta-sheet aggregation domain and/or as the beta-sheet destabilizing mutation. In alternative embodiments, other non-naturally occurring amino acids or amino acid analogues could be used, including e.g. N-alkyl analogues of the amino acids. Peptides that contain D-amino acids or other non-naturally occurring amino acid residues may have a longer half-life in vivo than peptides that contain only naturally occurring amino acids, for example as a result of serum protein binding and/or enhanced stability against proteases encountered in vivo.

[0048] As used herein, the term “conservative amino acid substitution” means an amino acid sequence that differs from a reference sequence by one or more conservative substitutions of one or more amino acid residues relative to a reference molecule, regardless of where such amino acid substitution occurs (i.e. regardless of whether such substitution is within the beta-sheet aggregation domain described herein or outside such domain). Amino acid substitutions that are considered to be “conservative” include any of:
[0049] Interchanging any one of A, V, L, or I, or an amino acid analogue substantially similar thereto;
[0050] Interchanging any one of S, C, U, T, or M, or an amino acid analogue substantially similar thereto;
[0051] Interchanging any one of F, Y, or W, or an amino acid analogue substantially similar thereto;
[0052] Interchanging any one of D or E or an amino acid analogue substantially similar thereto;
[0053] Interchanging any one of N or Q or an amino acid analogue substantially similar thereto; and/or
[0054] Interchanging any one of H, K or R or an amino acid analogue substantially similar thereto.

[0055] In some embodiments, an engineered protein that is a non-aggregating analogue of a protein implicated in a proteinopathy that can be used as a therapeutic and/or prophylactic agent for the proteinopathy is provided. In some embodiments, the engineered protein includes one or more beta-sheet destabilizing modifications in the beta-sheet aggregation domain. A beta-sheet destabilizing modification is a modification that interferes with and/or disrupts the formation of a beta-sheet structure, thereby interfering with or preventing the formation of the cross-beta sheet structure that can contribute to the proteinopathy. For example, in some embodiments, a beta-sheet destabilizing modification may disrupt one or more hydrogen bonds that are important to forming the stacked beta-sheet structure and/or the cross-beta sheet structure that can contribute to the proteinopathy. In some embodiments, a beta-sheet destabilizing modification may alter a conformation of the beta-sheet aggregation domain (e.g. by kinking the peptide backbone and/or causing interactions with other residues) to interfere with formation of the stacked beta-sheet structure and/or the cross-beta sheet structure that can contribute to the proteinopathy. In some embodiments, the beta-sheet destabilizing modification does not interfere with, or interferes only minimally with, the native function of the protein, so that the engineered protein retains or substantially retains the wild type activity of the protein.

[0056] In some embodiments, the engineered non-aggregating analogue of the protein involved in a proteinopathy is considered to be non-aggregating when the beta-sheet destabilizing modification results in at least a 2-fold, at least a 3-fold or at least a 4-fold lower steady state level of aggregation in a thioflavin-T assay as compared with the wild type protein. In some embodiments, the engineered non-aggregating analogue is an analogue of Aβ42 peptide and has at least a 2-fold, at least a 3-fold or at least a 4-fold lower steady state level of aggregation in a thioflavin-T assay as compared with wild-type Aβ42 having the amino acid sequence of SEQ ID NO:1.

[0057] Examples of beta-sheet destabilizing modifications include:
[0058] Substitution of a naturally occurring amino acid with a charged or hydrophilic amino acid within the beta-sheet aggregation domain (e.g. K, R, H, E, D, S, T, N, Q or C);
[0059] Substitution of a naturally occurring amino acid with a proline (P) residue within the beta-sheet aggregation domain;
[0060] Substitution of a naturally occurring amino acid with a glycine (G) residue within the beta-sheet aggregation domain;
[0061] Substitution of a naturally occurring amino acid with an amino acid analogue that interferes with beta-sheet formation within the beta-sheet aggregation domain, examples of said amino acid analogues that interfere with beta-sheet formation include 3-hydroxyproline, 4-hydroxyproline, selenocysteine, pyroglutamic acid, carboxyglutamic acid, octenyl alanine, pyrrolysine, palmitoyl aspartate, D-amino acids including D-proline, β-amino acids, γ-amino acids, Homo-amino acids, β-Homo-amino acids, α-methyl amino acids, N-methyl amino acids, N-ethyl amino acids, N-alkylated amino acid derivatives, pyruvic acid derivatives, branched-chain amino acid derivatives, nitro amino acid derivatives, halogenated amino acid derivatives, ring-substituted amino acid derivatives, aromatic amino acid derivatives, linear core amino acids, peptoid derivatives, hydroxylated amino acid derivatives, cyclic amino acids, bicyclic amino acids, 3-amino-3-aryl-propionic acids, 3-amino-4-aryl-butyric acids, amino acids with aromatic spacers, alicyclic amino acids, α-phenylglycine derivatives, or the like.
[0062] Deletion of one or more naturally occurring amino acid residues within the beta-sheet aggregation domain, optionally including deletion of up to and including the entirety of the beta-sheet aggregation domain; and/or.
[0063] Insertions of one or more amino acid residues within the beta-sheet aggregation domain, e.g. insertion of 1, 2, 3, 4 or 5 amino acid residues within the beta-sheet aggregation domain. In some embodiments, one or more of the inserted amino acid residues is a proline (P) residue. In some embodiments, one or more of the inserted amino acid residues is a glycine (G) residue. In some embodiments, one or more of the inserted amino acid residues is a charged and/or hydrophilic amino acid (e.g. K, R, H, E, D, S, T, N, Q or C). In some embodiments, one or more of the inserted amino acid residues is an amino acid analogue that interferes with beta-sheet formation as described above, examples of said amino acid analogues that interfere with beta-sheet formation include 3-hydroxyproline, 4-hydroxyproline, selenocysteine, pyroglutamic acid, carboxyglutamic acid, octenyl alanine, pyrrolysine, palmitoyl aspartate, D-amino acids including D-proline, β-amino acids, γ-amino acids, Homo-amino acids, β-Homo-amino acids, α-methyl amino acids, N-methyl amino acids, N-ethyl amino acids, N-alkylated amino acid derivatives (preferably with 1, 2 or 3 carbons in the alkyl moiety), pyruvic acid derivatives, branched-chain amino acid derivatives, nitro amino acid derivatives, halogenated amino acid derivatives, ring-substituted amino acid derivatives, aromatic amino acid derivatives, linear core amino acids, peptoid derivatives, hydroxylated amino acid derivatives, cyclic amino acids, bicyclic amino acids, 3-amino-3-aryl-propionic acids, 3-amino-4-aryl-butyric acids, amino acids with aromatic spacers, alicyclic amino acids, α-phenylglycine derivatives, or the like.

[0064] Without being bound by theory, it is believed that substitution of such amino acid residues or deletion or insertion of at least one amino acid residue within the beta-sheet aggregation domain of the protein involved in a proteinopathy interferes with the effective formation of a cross-beta sheet structure, thereby limiting or preventing aggregation of the protein while leaving the protein soluble and available to perform its wild-type function. Thus, the engineered protein can be used to restore the loss-of-function defects that may be associated with the proteinopathy, while not aggravating or increasing aggregation of the protein involved in the proteinopathy. To achieve this, in some embodiments, the engineered protein incorporating one or more beta-sheet destabilizing modifications within a beta-sheet aggregation domain fully or substantially retains its native function, e.g. the engineered protein is able to perform its native function at least 50% of the level of the native soluble protein (including e.g. at least 55%, 60%, 65%, 70%, 75%, 80%, 85%, 86%, 87%, 88%, 89%, 90%, 91%, 92%, 93%, 94%, 95%, 96%, 97%, 98%, 99% or 100% of the level of the native soluble protein).

[0065] In some embodiments, the non-aggregating peptide analogue is an analogue of Aβ42, and the native function of the Aβ42 is to enhance or induce α7 nicotinic acetylcholine receptor (α7nAChR) mediated Ca²⁺ influx. Typically, the α7nAChR mediated Ca²⁺ influx can be triggered using an agonist (e.g. a small molecule agonist such as PNU 282987), but the influx is increased in the presence of an enhancing molecule such as the non-aggregating peptide analogue of the Aβ42 peptide described herein. The peptide described herein can also induce the influx on its own. In some embodiments, enhancing α7nAChR mediated Ca²⁺ influx means that a level of the α7nAChR mediated Ca²⁺ influx in the presence of the peptide is at least 130%, at least 150%, or at least 170% of a pre-control level of Ca²⁺ influx. In some such embodiments, the non-aggregating peptide analogue is able to perform the native function of enhancing α7nAChR mediated Ca²⁺ influx at a level of at least 50% of the level of the native soluble Aβ42 peptide (including e.g. at least 55%, 60%, 65%, 70%, 75%, 80%, 85%, 86%, 87%, 88%, 89%, 90%, 91%, 92%, 93%, 94%, 95%, 96%, 97%, 98%, 99% or 100% of the level of the native soluble Aβ42 peptide). In some embodiments, the non-aggregating analogue of Aβ42 is able to enhance α7nAChR-mediated Ca²⁺ influx when present in cortical neurons at a concentration of ≤3000 pM, including e.g. ≤300 pM, including e.g. ≤30 pM, including e.g. ≤3 pM. In some embodiments, the non-aggregating analogue of Aβ42 is able to enhance α7nAChR-mediated Ca²⁺ influx when present in neuronal cell-lines such as N2a and SH-SY5Y cells at a concentration of ≤3000 pM, including e.g. ≤300 pM, including e.g. ≤30 pM, including e.g. ≤3 pM. In some embodiments, the non-aggregating peptide analogue of Aβ42 is able to enhance α7nAChR mediated Ca²⁺ influx to a greater extent than wild-type Aβ42 peptide having the amino acid sequence of SEQ ID NO:1, e.g. The α7nAChR mediated Ca²⁺ influx can also be indirectly detected or quantitated by measuring a downstream event, such as ERK1/2 phosphorylation, cell proliferation or neurogenesis. ERK1/2 phosphorylation occurs within minutes of α7nAChR mediated Ca²⁺ influx and can be measured using ELISA. Yet another alternative way of detecting or quantitating native function is to assess rescue of neuronal cells after pharmacological depletion of Aβ42 using γ-secretase inhibitor. Still another alternative way of detecting or quantitating native function is to assess proliferation of neuronal cells which express a non-functional mutant amyloid precursor protein (APP).

[0066] In some embodiments, portions of the protein other than the beta-sheet aggregation domain may be important for the native function of the protein. For example, in the case of Aβ42 peptide, without being bound by theory, it is believed that the YEVHHQ domain at residues 10-15 of the peptide and the residues at positions 19-24 of the peptide are important for native protein function, for example for proper binding to the α7 nicotinic acetylcholine receptor (α7nAChR). Thus, in some embodiments, the portions of Aβ42 located N-terminal to the beta-sheet aggregation domain, i.e. positions 1-28 of the peptide, are believed to be important for native peptide function. In this description, these residues at or corresponding to positions 1-28 of the Aβ42 peptide are referred to as the “N-terminal domain”.

[0067] The N-terminal domain of the non-aggregating peptide analogue may comprise an amino-acid sequence differing from residues 1-28 of SEQ ID NO: 1 by no more than 6, (preferably 5, more preferably 4, even more preferably 3, yet more preferably 2, still more preferably 1, most preferably 0) deletions, insertions and/or substitutions, preferably conservative substitutions. In some embodiments, the engineered peptide that is a non-aggregating analogue of Aβ42 retains the wild type amino acid sequence of the N-terminal domain, or contains only conservative amino acid substitutions within the N-terminal domain. In some embodiments, the peptide that is a non-aggregating analogue of Aβ42 has zero or at most one, at most two, at most three, at most four, at most five, at most six, at most seven, at most eight, or at most nine conservative amino acid substitutions in the N-terminal domain. The beta-sheet aggregation domain of the non-aggregating analogue comprises an amino-acid sequence differing from positions corresponding to positions residues 29-42 of SEQ ID NO: 1 by no more than 6, (preferably 5, more preferably 4, even more preferably 3, yet more preferably 2, still more preferably 1, most preferably 0) deletions, insertions and/or substitutions, preferably conservative substitutions. Preferably, the non-aggregating peptide analogue as defined comprises, in addition to the beta-sheet destabilizing modification, at most three (preferably two, more preferably one) conservative amino acid substitutions in the beta-sheet aggregation domain relative to SEQ ID NO:1.

[0068] In some embodiments, the disease or disorder that is the proteinopathy is Alzheimer's disease, Parkinson's disease, Lewy body disease or Lewy body dementia, Pick's disease, Creutzfeld-Jakob disease, Huntington's disease, amyotrophic lateral sclerosis (ALS), Down syndrome, neuronal degeneration with brain iron accumulation type I (Hallervorde-Spatz disease), Kuru or other transmissible spongiform encephalopathy (TSE), mild cognitive impairment (MCI), cerebral amyloid angiopathy (CAA), vascular dementias, any neurodegenerative disease characterized by abnormal amyloid deposition, any other disease or disorder listed in Table 1, or the like.

[0069] In some embodiments, the engineered protein is a non-aggregating analogue of a protein implicated in a proteinopathy, including without limitation amyloid precursor protein (APP), amyloid beta protein (including Aβ-39, Aβ-40, Aβ-42 or Aβ-43 isoforms), alpha-synuclein, prion protein, Huntingtin protein, p53, any protein or peptide listed in Table 1, or the like.

[0070] In some embodiments, a nucleic acid encoding the engineered peptide is provided. The nucleic acid can be e.g. DNA or RNA (such as mRNA) that can be transcribed and/or translated by cellular machinery to produce the desired engineered protein in vivo. Any suitable method of genetic engineering (e.g. transfection of cells obtained from and then reintroduced into the body, CRISPR-Cas gene editing, introduction of a suitable expression vector into target cells, or the like) and/or nucleic acid delivery system (e.g. lipid nanoparticles, which can be used to deliver CRISPR-Cas gene editing systems, mRNA or expression vectors to target cells) can be used to supply the nucleic acid encoding the engineered protein to the desired target cells. Any methods now known or developed in future for causing desired cells to express a desired protein could be used in various embodiments to cause cells to express the desired non-aggregating engineered peptide. In some embodiments, including embodiments in which the engineered peptide incorporates a non-naturally occurring amino acid analogue, the engineered peptide is chemically synthesized.

[0071] In some embodiments, therapeutic compositions comprising engineered peptides that are non-aggregating analogues or nucleic acids encoding such peptides as described herein are administered in any suitable manner now known or developed in future, including direct administration, genetic engineering techniques, liposome-mediated delivery including lipid nanoparticle delivery, or the like. Modes of direct administration can include subcutaneous, intravenous, intracerebroventricular, intracerebral, intrathecal, intraperitoneal, intramuscular or intravenous injection, infusion, or topical, nasal, oral (including sublingual or buccal), rectal, ocular or otic, or other form of delivery, including pumping or direct injection into the brain of a subject. Modes of liposome-mediated delivery can include direct delivery of the engineered peptide or a nucleic acid (e.g. mRNA) encoding the engineered peptide for expression by a cell, or DNA encoding the engineered peptide together with suitable mechanisms (e.g. CRISPR-Cas gene editing systems) to integrate the DNA into the genome of the cell to facilitate expression of the engineered protein by the cell, or any other mechanism of using a DNA vector as an expression module for the desired peptide.

[0072] In some embodiments, the amount of engineered peptide to be administered or caused to be expressed can be determined by the person skilled in the art dependent on the condition to be treated and the mode of administration. In some embodiments, the interval of administration of the engineered peptide can be determined by the person skilled in the art dependent on the condition to be treated and the mode of administration. In some embodiments in which the engineered peptide is a non-aggregating analogue of Aβ42, the amount of engineered peptide to be administered or caused to be expressed is sufficient to provide a concentration of the engineered peptide in the cerebrospinal fluid of a subject of between about 200 and 600 μg/mL, including any value or subrange therebetween, e.g. 250, 300, 350, 400, 450, 500 or 550 μg/mL. The concentration of Aβ42 and/or the engineered peptide in the cerebrospinal fluid of the subject may be determined using liquid chromatography-tandem mass spectrometry or an immunoassay, preferably an ELISA immunoassay (e.g. Elecsys, AlzBio3). The precise target concentration of engineered peptide may vary depending on the method of measurement, the specific engineered peptide and the specific condition, but can be established by routine experimentation involving samples from diseased/at risk individuals compared to heathy controls (see Example 4).

[0073] In some embodiments, a method of screening a subject to determine whether the subject is a candidate for treatment and/or prophylaxis of a proteinopathy using an engineered peptide that is a non-aggregating analogue of a protein involved in the proteinopathy is provided. In some embodiments, the proteinopathy is Alzheimer's disease and the protein involved in the proteinopathy is the Aβ42 peptide, or the proteinopathy is another disease or disorder associated with a decreased level of soluble Aβ42 peptide. In some embodiments, the method of screening the subject to determine whether the subject is a candidate for treatment and/or prophylaxis of Alzheimer's disease involves determining a concentration of Aβ42 in the cerebrospinal fluid of the subject. If the measured concentration of Aβ42 in the cerebrospinal fluid is less than about 500 pM, less than about 400 pM, less than about 300 pM, or less than about 200 pM, including e.g. less than about 175, 150, 125 or 100 pM, then the subject is identified as a candidate for treatment and/or prophylaxis of Alzheimer's disease via the administration of a non-aggregating analogue of the Aβ42 peptide as described herein. In some such embodiments, the concentration of Aβ42 in the cerebrospinal fluid of the subject is determined using liquid chromatography-tandem mass spectrometry or an immunoassay (e.g. Elecsys, AlzBio3).

[0074] In some embodiments, the subject has familial Alzheimer's disease, including familial Alzheimer's disease caused by mutations in PSEN1, PSEN2, or AβPP. Without being bound by theory, it is believed that the mutations associated with familial Alzheimer's disease may reduce the level of soluble Aβ42 peptide and/or interfere with the normal function of the peptide. Thus, supplementing the level of functional Aβ42 peptide in the subject via administration of an engineered peptide that is a non-aggregating analogue of Aβ42 as described herein may be particularly beneficial for such subjects.

[0075] In some embodiments, the subject is a mammalian subject. In some embodiments, the subject is a human subject.

[0076] With specific reference to the example of the amyloid-beta peptide implicated in Alzheimer's disease and other disorders, the wild type sequence of human Aβ-42 is as set forth in SEQ ID NO: 1, and this is shown in FIG. 1. The beta-sheet aggregation domain of Aβ-42 is believed to be the carboxy-terminal residues 29-42 thereof. Accordingly, in some embodiments, the engineered peptide is a form of amyloid-beta peptide having a beta-sheet destabilizing modification at one or more of positions 29-42 thereof. The beta-sheet destabilizing modification may be a substitution of one or more of the amino acids at positions 29-42 (including any position therebetween, e.g. positions 29, 30, 31, 32, 33, 34, 35, 36, 37, 38, 39, 40, 41 or 42) with an amino acid that interferes with beta-sheet formation such as P, G, K, R, H, E, D, S, T, N, Q, C or an amino acid analogue that interferes with beta-sheet formation including e.g. 3-hydroxyproline, 4-hydroxyproline, selenocysteine, pyroglutamic acid, carboxyglutamic acid, octenyl alanine, pyrrolysine, palmitoyl aspartate, D-amino acids including D-proline, β-amino acids, γ-amino acids, Homo-amino acids, β-Homo-amino acids, α-methyl amino acids, N-methyl amino acids, N-ethyl amino acids, N-alkylated amino acid derivatives (preferably with 1, 2 or 3 carbons in the alkyl moiety), pyruvic acid derivatives, branched-chain amino acid derivatives, nitro amino acid derivatives, halogenated amino acid derivatives, ring-substituted amino acid derivatives, aromatic amino acid derivatives, linear core amino acids, peptoid derivatives, hydroxylated amino acid derivatives, cyclic amino acids, bicyclic amino acids, 3-amino-3-aryl-propionic acids, 3-amino-4-aryl-butyric acids, amino acids with aromatic spacers, alicyclic amino acids, α-phenylglycine derivatives, or the like. The beta-sheet destabilizing modification may be a deletion of the naturally occurring amino acid residue at that position, or insertion of between 1 and 5 amino acid residues at that position (optionally where at least one of the inserted amino acid residues is P, G, K, R, H, E, D, S, T, N, Q, or C or an amino acid analogue that interferes with beta-sheet formation as set forth above). Examples of proteins having beta-sheet destabilizing modifications include the amino acid sequences of SEQ ID NO: 2-193 shown in FIG. 1 or SEQ ID NOs: 194-207 or SEQ ID NOs: 712-742 (wherein X indicates the position of a beta-sheet destabilizing modification) or any combination thereof. Additional examples include any sequence that is at least 90% identical to any of SEQ ID NO: 2-207, including at least 91%, 92%, 93%, 94%, 95%, 96%, 97%, 98%, 99% or 99.9% identical thereto. In some embodiments, the engineered protein does not include a peptide having the sequence of SEQ ID NO:3, SEQ ID NO:5 or SEQ ID NO: 15. In the illustrated preferred embodiments of FIG. 1, the X at position 36 of SEQ ID NO: 187 represents octenyl alanine; the X at position 35 of SEQ ID NO: 188 represents D-proline, the X at position 35 of SEQ ID NO:189 represents pyroglutamic acid; the X at position 35 of SEQ ID NO: 190 represents N-methyl methionine, the X at position 35 of SEQ ID NO: 191 represents carboxyglutamic acid, the X at position 35 of SEQ ID NO: 192 represents pyrrolysine, and the X at position 1 of SEQ ID NO: 193 represents palmitoyl-aspartate. Peptides analogues according to SEQ ID NO: 190 or 192 are the most preferred.

[0077] In some embodiments, the engineered peptide is Aβ-43 having any of the foregoing sequences described for Aβ-42, with an additional T residue provided at the carboxy-terminal end of the peptide to provide the Aβ-43 isoform.

[0078] In some embodiments, the engineered peptide is Aβ-40 having any of the foregoing sequences described for Aβ-42, with the two carboxy-terminal amino acids removed to provide the Aβ-40 isoform.

[0079] In some embodiments, the engineered peptide is Aβ-39 having any of the foregoing sequences described for Aβ-42, with the three carboxy-terminal amino acids removed to provide the Aβ-39 isoform.

[0080] With specific reference to the example of the alpha-synuclein protein implicated in Parkinson's disease, the wild type sequence of human alpha-synuclein is as set forth in SEQ ID NO:208. The beta-sheet aggregation domain of alpha-synuclein is believed to be residues 61-95 thereof. Accordingly, in some embodiments, the engineered protein is a form of alpha-synuclein having a beta-sheet destabilizing modification at one or more of positions 61-95 thereof. In some embodiments, the beta-sheet destabilizing modification is a substitution of one or more of the amino acids at positions 61-95 (including any position therebetween, e.g. positions 61, 62, 63, 64, 65, 66, 67, 68, 69, 70, 71, 72, 73, 74, 75, 76, 77, 78, 79, 80, 81, 82, 83, 84, 85, 86, 87, 88, 89, 90, 91, 92, 93, 94 or 95) with an amino acid that interferes with beta-sheet formation or with an amino acid analogue that interferes with beta-sheet formation as described above, or by deletion of the naturally occurring amino acid residue at that position, or by insertion of between 1 and 5 amino acid residues at that position (optionally wherein at least one of the inserted amino acid residues is P, G, K, R, H, E, D, S, T, N, Q, or C or an amino acid analogue that interferes with beta-sheet formation), including for example a protein having any of the sequences of SEQ ID NO:209-663 or any of the sequences of SEQ ID NO:664-698 (wherein X indicates the position of a beta-sheet destabilizing modification) or any combination thereof, or any sequence that is at least 90% identical thereto, including at least 91%, 92%, 93%, 94%, 95%, 96%, 97%, 98%, 99% or 99.9% identical thereto.

[0081] With specific reference to the example of prion protein implicated in Creutzfeld-Jakob disease, the wild type sequence of human prion protein is as set forth in SEQ ID NO: 699. The beta-sheet aggregation domain of the human prion protein is believed to be residues 109-121 thereof. Accordingly, in some embodiments, the engineered protein is a form of prion protein having a beta-sheet destabilizing modification at one or more of positions 109-121 thereof. In some embodiments, the beta-sheet destabilizing modification is a substitution of one or more of the amino acids at positions 109-121 thereof (including any position therebetween, e.g. positions 109, 110, 111, 112, 113, 114, 115, 116, 117, 118, 119, 120 or 121) with an amino acid that interferes with beta-sheet formation or with an amino acid analogue that interferes with beta-sheet formation as described above, or by deletion of the naturally occurring amino acid residue at that position, or by insertion of between 1 and 5 amino acid residues at that position (optionally wherein at least one of the inserted amino acid residues is P, G, K, R, H, E, D, S, T, N, Q, or C or an amino acid analogue that interferes with beta-sheet formation), including for example a protein having the amino acid sequence of any one of SEQ ID NO:700-710 or any combination thereof, or any sequence that is at least 90% identical thereto, including at least 91%, 92%, 93%, 94%, 95%, 96%, 97%, 98%, 99% or 99.9% identical thereto, wherein the X denotes the position of the beta-sheet destabilizing modification.

[0082] With reference to FIG. 2, in some embodiments a method 100 of designing a non-aggregating analogue of a protein implicated in a proteinopathy is described. At 102, the target protein that is implicated in the proteinopathy is selected. For example, where the proteinopathy is Alzheimer's disease, amyloid-beta could be selected as the target protein (or peptide) that is implicated in the proteinopathy based on available scientific literature. Where the proteinopathy is Parkinson's disease, alpha-synuclein could be selected as the target protein that is implicated in the proteinopathy based on available scientific literature. Where the proteinopathy is Creutzfeld-Jakob disease, prion protein could be selected as the target protein that is implicated in the proteinopathy based on available scientific literature. In other embodiments where the protein that is implicated in the proteinopathy is not known, suitable experiments could be conducted to determine the identity of a protein that has aggregated in a proteinopathy to select the relevant protein for further steps.

[0083] At 104, the beta-sheet aggregation domain of the selected protein is identified. For example, structural biology studies (e.g. X-ray crystallography or other studies) or a literature review of such studies can be carried out to evaluate the amyloid structure of the selected protein, to identify the domain(s) involved in aggregation.

[0084] At 106, one or more beta-sheet destabilizing modifications that may prevent the formation of a cross-beta sheet structure by the selected protein are identified. The beta-sheet destabilizing modification(s) are made in some embodiments by modifying and/or deleting certain naturally occurring amino acid residues within the beta-sheet aggregation domain. For example, one or more naturally occurring amino acid residues within the beta-sheet aggregation domain may be selected for deletion, or for substitution with G, P, K, R, H, E, D, S, T, N, Q or C or an amino acid analogue that disrupts beta-sheet formation as described above, or the like.

[0085] Once the beta-sheet destabilizing modification(s) have been identified by applying method 100, then a suitable construct for administration in vivo (e.g. an engineered peptide or a nucleic acid encoding such a peptide) can be made and administered to a subject suffering from or at risk of developing the proteinopathy as described above.

[0086] FIG. 3 shows an example embodiment of an engineered protein 200 that is a non-aggregating analogue of a protein involved in a proteinopathy. Engineered protein 200 has an N-terminus 202, a C-terminus 204, and a beta-sheet aggregation domain 206. Within beta-sheet aggregation domain 206, a beta-sheet destabilizing modification is engineered into the peptide sequence, so that engineered protein 200 will be a non-aggregating analogue of a protein involved in a proteinopathy.

[0087] With specific reference to engineered peptides useful for the treatment of Alzheimer's Disease, in some embodiments, one or more of the amino acids at positions 29, 30, 31, 32, 33, 34, 35, 36, 37, 38, 39, 40, 41 or 42 of Aβ42 is substituted with a non-naturally occurring amino acid that disrupts beta-sheet formation. In some embodiments, the non-naturally occurring amino acid that disrupts beta-sheet formation is an N-alkyl analogue of the naturally occurring amino acid, for example an N-methyl analogue or an N-ethyl analogue of the naturally occurring amino acid. Without being bound by theory, it is believed that substitution of an N-alkyl analogue of the naturally occurring amino acid within the beta-sheet aggregation domain can disrupt the formation of intermolecular hydrogen bonds between aggregating peptides, while preserving the amino acid side chain and therefore preserving the normal function of the peptide.

[0088] In some specific embodiments, one or more of the following substitutions of a non-naturally occurring amino acid that disrupts beta-sheet formation is made in the Aβ42 peptide to provide an engineered non-aggregating peptide analogue: G29 is N-methyl glycine or N-ethyl glycine, A30 is N-methyl alanine or N-ethyl alanine, I31 is N-methyl isoleucine or N-ethyl isoleucine, I32 is N-methyl isoleucine or N-ethyl isoleucine, G33 is N-methyl glycine or N-ethyl glycine, L34 is N-methyl leucine or N-ethyl leucine, M35 is N-methyl methionine or N-ethyl methionine, V36 is N-methyl valine or N-ethyl valine, G37 is N-methyl glycine or N-ethyl glycine, G38 is N-methyl glycine or N-ethyl glycine, V39 is N-methyl valine or N-ethyl valine, V40 is N-methyl valine or N-ethyl valine, 141 is N-methyl isoleucine or N-ethyl isoleucine, and/or A42 is N-methyl alanine or N-ethyl alanine. In some embodiments, the non-aggregating peptide analogue maintains or substantially maintains the wild type function of Aβ42.

[0089] In some specific embodiments, the substitution of a non-naturally occurring amino acid in the engineered non-aggregating analogue of the Aβ42 peptide is made at one or both of positions 35 and 36. Without being bound by theory, it is believed that M35 lies in a strategic position in the cross-β amyloid conformation of Aβ42, so that this residue and adjacent residues may represent particularly desirable target sites for modification with a non-naturally occurring amino acid to help strategically disrupt intermolecular hydrogen bonding, thereby decreasing the aggregation propensity of the peptide. In some embodiments, the engineered non-aggregating analogue of the Aβ42 peptide has the non-naturally occurring amino acid N-methyl methionine or N-ethyl methionine substituted for M35. In some embodiments, the engineered non-aggregating analogue of the Aβ42 peptide has the non-naturally occurring amino acid N-methyl valine or N-ethyl valine substituted for V36.

### EXAMPLES

[0090] Specific embodiments are further described with reference to the following examples, which are intended to be illustrative and not limiting in nature.

### Mouse Study Methods

[0091] Female wild type and 5xFAD transgenic mice (Jackson laboratories) were used for the mouse behavioural experiment. Mice were individually housed in controlled humidity, temperature and light conditions, and had ad libitum access to food and water. Randomization to treatment groups was carried out by using GraphPad QuickCalcs (GraphPad Software, San Diego, CA, USA), and all data analysis was performed blinded to the experimental groups. All the animal experiments followed the Council of Europe Legislation and Regulation for Animal Protection and are approved by the National Animal Experiment Board of Finland. Every effort was made to minimize the harm and suffering of the animals. The mice were treated with the vehicle or peptide preparations once a week i.v. starting at the age of 1 month until 3 months of age. Behavioral testing: the 5xFAD mice have deficits in nest building test starting at 3 months of age. Briefly, the soft bedding material and plastic shelter tube are moved to the one end of the cage and soft tissue paper (17 cm×17 cm) is placed in the other end of the cage. After 24 hours, a picture of the cage is taken, and the points given according to the set scale. 0 points are given if tissue paper remains untouched, 5 points are given when animal incorporates tissue into nest. Sacrifice and sample processing: At the time of sacrifice, the mice were anesthetized using 250 mg/kg Avertin® (Sigma-Aldrich, St. Louis, MO, USA) and perfused transcardially with saline containing 2500 IU/L heparin (Heparin LEO 5000 IU/ml, Leo Pharma A/S, Ballerup, Denmark). Terminal blood samples were taken at the time of sacrifice (approximately 300 μl of blood) using 1:10 dilution of 3.8% sodium citrate as anticoagulant. The blood samples were centrifuged first 1500 g for 6 minutes, after which the supernatant was removed to a new tube and further centrifuged for 12 000 g for 3 minutes. The resulting plasma was stored in two separate aliquots at −80 degrees for further analysis. The brains were dissected out and cut mid-sagittally into left and right hemispheres. The left hemispheres were post-fixed in 4% paraformaldehyde (PFA, Sigma-Aldrich, St. Louis, MO, USA) for 20 hours, cryoprotected in 30% sucrose in PB for 2 days and frozen on liquid nitrogen. The cortices and hippocampi of the right hemispheres were freshly frozen.

[0092] Immunohistochemistry: The brains were post-fixed in 4% paraformaldehyde (PFA, Sigma-Aldrich, St. Louis, MO, USA) for 20 hours, followed by cryoprotection in 30% sucrose for 48 hours. The brains were frozen on liquid nitrogen and cut coronally into 20 μm thick sections with a cryostat (Leica Microsystems, Wetzlar, Germany) in anti-freeze solution. The immunohistochemical staining for WO2, GFAP and Iba1 was carried out on six consecutive sections at 400 μm intervals. The brain sections were incubated overnight at room temperature with primary antibody (Iba-1 1:250 dilution, Wako Chemicals, Tokyo, Japan). Secondary antibody was applied on sections after three washes in 0.05% Tween®20 (Sigma-Aldrich, St. Louis, MO, USA) in PBS. Fluorescent Alexa 488 or 568-conjugated secondary antibodies (1:200 dilution, Abcam, Cambridge, UK) was used for visualization of the immunoreactivities. For quantification of the immunoreactivities, hippocampal areas were imaged using 4 or 10× magnification on an AX70 microscope (Olympus corporation, Tokyo, Japan) with an adjacent digital camera (Color View 12 or F-View, Soft imaging system, Muenster, Germany) running AnalySis software (Soft Imaging System). Quantification of the immunoreactivities was performed using ImagePro Plus software (Media Cybernetics Inc., Rockville, MD, USA) at a predefined range and presented as relative immunoreactive area. All analyses will be performed blinded to the study groups.

[0093] THT method. ThT (Sigma-Aldrich) was prepared at 4 mM in MQ water. 50 μL of 500 μg/ml peptide (in normal saline) were incubated with 250 μL of 2.4 mM ThT solution (in water). ThT fluorescence was measured at 440 nm excitation and 480 nm emission in a black, clear-bottom 96-well plates (Corning, USA) at 10-15 min intervals (from bottom with periodic shaking) over 12-24 h on SpectraMax i3 microplate reader (Molecular Devices, USA). Curves were fitted using GraphPad Prism software.

[0094] In-vitro method. WT SH-SY5Y neuroblastoma cell line and SH-SY5Y cells stably expressing amyloid-precursor protein with the Swedish mutations (APP-SH-SY5Y) were grown in in growth medium Dulbecco's modified Eagle's medium (DMEM) with 5% FBS (Fetal Bovine Serum) ThermoFisher, USA), 1% Penicillin/Streptomycin (ThermoFisher, USA) at 37° C. and 5% CO2. The day before treatments, cells were seeded in 96-well cell culture plate in DMEM medium without FBS. On the day of treatment, WT SH-SY5Y were treated with 10 μM γ-secretase inhibitor (aldehyde 2-naphthoyl-VF-CHO) together with peptides at different concentrations for 48 hours. APP-SH-SY5Y were treated only with peptides for 72 hours. Cell proliferation was then measured using the WST-1 assay (Sigma-Aldrich) according to manufacturer's protocol.

[0095] Clinical method. To find the minimum required level of Aβ42 required for normal cognition, the inventors studied data from the Alzheimer's Disease Neuroimaging Initiative (ADNI), which is a study of over 2700 participants aged between 55 and 90 years (Weiner et al., Alzheimers Dement. 2013 September; 9 (5): e111-94). The inventors studied the levels of cerebrospinal fluid (CSF) Aβ42 within a sample of ADNI participants that were all positive for amyloid plaques based on positron emission tomography tests. The inventors found that amyloid positive individuals with normal cognition (CN) have an average CSF Aβ42 level of 900 pg/ml, which was significantly (asterisks representing significant differences, **P<0.01, and ***P<0.001) higher than CSF Aβ42 levels in individuals with mild cognitive impairment (MCI) and Alzheimer's disease (AD). The inventors conclude that reaching a CSF concentration of 900 μg/ml or equivalent in a subject's cerebrospinal fluid using active Aβ42 analogues is a reasonable therapeutic target for replacement therapy.

### Example 1—In Vivo Demonstration of Replacement Therapy

[0096] The results shown in FIGS. 4A, 4B and 4C demonstrate that replacement therapy using the engineered version of Aβ42 (Aβ40) having SEQ ID NO:3 with a beta-sheet destabilizing modification by virtue of the deletion of residues 41 and 42 of the beta-sheet aggregation domain leads to phenotype restoration in a well-established AD animal model (5XFAD mice).

[0097] Briefly, mice were administered a peptide having the sequence of SEQ ID NO:3 (Aβ-40) intravenously at a dosage of 5 mg/kg/day for five weeks.

[0098] As can be seen from the results shown in FIG. 4A, wild type mice exhibited a behavioral score of approximately 5/5, whereas the untreated 5XFAD mice exhibited an average behavioral score of 4/5. Administration of the engineered peptide Aβ-40 that is a non-aggregating analogue of Aβ-42 by virtue of the deletion of residues 41 and 42 of the beta-sheet aggregation domain for a period of five weeks restored mice to a behavioral score of approximately 5/5 (far right). Parallel results for wild type mice administered a scrambled peptide (having the sequence of SEQ ID NO:711) and 5XFAD mice administered the scrambled peptide as controls, together with the phenotype rescue demonstrated by administration of non-aggregating peptides RT3 (having the sequence of SEQ ID NO:3 (Aβ-40)) and RT88 (having the sequence of SEQ ID NO:88) are shown in FIGS. 4B and 4C, respectively.

[0099] As can be seen from FIG. 5A, 5XFAD mice that were treated with the engineered peptide that is a non-aggregating analogue of Aβ42 (SEQ ID NO:3) also exhibited reduced plaque load in the cortex as compared with vehicle treated animals. FIG. 5B shows a corresponding decreased level of plaque accumulation in the hippocampi of the treated animals as well.

### Example 2—Evaluation of Aggregation Propensity of Aβ42 Analogues

[0100] A thioflavin-T kinetics study was carried out on peptides having five different sequences, SEQ ID NO:88 having a proline (P) substitution in place of methionine (M) at position 35, wild type Aβ42 (SEQ ID NO:1), Aβ40 (SEQ ID NO:3), which has the last two C-terminal residues in the beta-sheet aggregation domain of Aβ42 deleted, SEQ ID NO: 190, which has a non-naturally occurring amino acid N-methyl methione substituted for the naturally occurring methionine at position 35, and SEQ ID NO:192, which has a non-naturally occurring amino acid pyrrolysine substituted for the naturally occurring methionine at position 35. As shown in FIG. 6A, the peptide having SEQ ID NO:88 has a lower aggregation propensity than the peptide having SEQ ID NO:3, which has a lower aggregation propensity than wild type Aβ42 having SEQ ID NO:1. As shown in FIG. 6B, the peptides having SEQ ID NO: 190 and SEQ ID NO: 192 also had lower aggregation propensity than wild type Aβ42 (SEQ ID NO:1).

### Example 3—Evaluation of Cell Proliferation in SH-SY5Y Neuronal Cell Line

[0101] Experiments were conducted to demonstrate that non-aggregating analogues of Aβ42 can enhance proliferation in neuronal cells which express mutant amyloid precursor protein (APP) and rescue neuronal cells after pharmacological depletion of Aβ42 using γ-secretase inhibitor.

[0102] FIG. 7A shows the percentage cell proliferation over untreated cells in assays on SH-SY5Y neuronal cell-line expressing amyloid precursor protein gene with the Swedish mutations (APP-SH-SY5Y). Cells were treated with different concentrations of Aβ42 or non-aggregating analogues thereof or a scrambled control peptide (YHAGVDKEVVFDEGAGAEHGLAQKIVRGFGVSDVSMIHINLF, SEQ ID NO:711) for 72 h in serum-free conditions, then cell proliferation was measured using the WST-1 assay. Results represent the mean of two experiments in quadruplets, with asterisks representing significant differences (significant differences in comparison untreated APP-SH-SY5Y cells were assessed using one-way ANOVA with Dunnetts's multiple comparison test and are indicated by *P<0.05, **P<0.01, and ***P<0.001, ns: non significant.). 0001 Peptide is wild type Aβ42 having SEQ ID NO:1. 0003 Peptide is Aβ40 peptide having SEQ ID NO:3. 0088 Peptide is an Aβ42 analogue having SEQ ID NO:88 (M35P modification), and 0100 Peptide is an Aβ42 analogue having SEQ ID NO: 100 (V36P).

[0103] FIG. 7B shows the percentage cell proliferation over wild type cells in assays on SH-SY5Y neuronal cell-line expressing amyloid precursor protein gene with the Swedish mutations (APP-SH-SY5Y). Cells were treated with different concentrations of Aβ42 or non-aggregating analogues thereof or a scrambled control peptide having SEQ ID NO:711 for 72 h in serum-free conditions, then cell proliferation was measured using the WST-1 assay. Results represent the mean of two experiments in quadruplets, with asterisks representing significant differences (significant differences in comparison untreated wild type SH-SY5Y cells were assessed using one-way ANOVA with Dunnett's multiple comparison test and are indicated by *P<0.05, **P<0.01, and ***P<0.001, ns: non significant.). 0001 Peptide is wild type Aβ42 having SEQ ID NO:1. 0003 Peptide is Aβ40 peptide having SEQ ID NO:3. 0088 Peptide is an Aβ42 analogue having SEQ ID NO:88 (M35P modification), and 0100 Peptide is an Aβ42 analogue having SEQ ID NO: 100 (V36P).

[0104] FIGS. 7C and 7D show data from additional similar experiments showing cell proliferation over untreated cells plotted along a shorter γ-axis to better show comparisons.

[0105] FIG. 8 shows SH-SY5Y neuronal cells that were treated with 10 μM of γ-secretase inhibitor (aldehyde 2-naphthoyl-VF-CHO) then treated with different concentrations of Aβ42 or non-aggregating analogues thereof or a scrambled control peptide peptides (sequences as above) for 48 hours in serum-free conditions, then cell proliferation was measured using the WST-1 assay. Results represent the mean of quadruplet treatments, with asterisks representing significant differences compared to γ-secretase inhibitor treated cells. Significant differences were assessed using one-way ANOVA with Dunnett's multiple comparison test and are indicated by *P<0.05, **P<0.01, and ***P<0.001, ns: non significant.

### Example 4—Determination of Importance of Soluble Aβ42 for Cognitive Function

[0106] FIG. 9A and FIG. 9B show that decreasing levels of soluble Aβ42 peptide in cerebrospinal fluid is associated with decreasing cognitive function, even across patients with increasing plaque load (FIG. 9B). In this study, levels of Aβ42 in cerebrospinal fluid (CSF) were determined using an ELISA immunoassay (Elecsys) according to data provided by the Alzheimer's Disease Neuroimaging Initiative (ADNI). Soluble Aβ42 across all subjects in each diagnostic category is shown in FIG. 9A, while FIG. 9B shows soluble Aβ42 levels in each diagnostic category across CL tertiles, where CL tertiles were determined by quantifying standard uptake value ratio (SUVR) for a PET scan for amyloidosis, quantifying SUVR across cortical gray matter, normalized by the whole cerebellum and dividing into SUVR tertiles; SUVR levels were converted in centiloids (CL) using the specific equation for each tracer as provided by ADNI. Lower levels of soluble Aβ42 were associated with mild cognitive impairment, with even lower levels associated with the presence of Alzheimer's disease. See also EClinical Medicine (2021) Vol. 38 100988, the entirety of which is incorporated by reference herein. Thus, decreasing levels of soluble Aβ42 are associated with decreasing levels of cognitive function.

[0107] FIG. 10 shows a comparison of cerebrospinal fluid Aβ42 levels between non-progressors and progressors to a clinical dementia rating (CDR) in a PiB-PET positive cohort (i.e. patients exhibiting amyloid plaques) in a retrospective longitudinal study among mutation carriers participating in the Dominantly Inherited Alzheimer Network (DIAN) cohort study. In this study, CSF levels of Aβ42 were evaluated using the AlzBio3 assay from Fujirebio, Malvern, PA. Non-CDR progressors had a higher value of Aβ42 in CSF (297.73±13.66) vs. CDR progressors (218.73±17.22); overall cohort: non-CDR progressors (380.83±14.5) vs. CDR progressors (313.35±26.46). Error bar represents the standard error of mean. CDR progression was defined as any increase in CDR over the follow-up period of the study. Patients were defined as amyloid PiB-PET-positive if their standard uptake (SUVR) of Pittsburgh compound B PET (PIB-PET) was greater than or equal to 1.42. Different assays may produce different absolute numbers for the level of soluble Aβ42 in CSF, but the overall trend of lower levels of soluble Aβ42 being associated with poorer outcomes is consistent.

[0108] Replacement therapy in various embodiments will aim to restore the levels of soluble functional protein to this level using non aggregating analogues.

### Example 5—Effect of Non-Aggregating Peptide Analogues on the α7 Nicotinic Acetylcholine Receptors in Cortical Neurons

[0109] Live cell calcium imaging of cultured WT mouse cortical neurons with PC-driven fast application of combination of the α7 agonist PNU 282987 (1 μM) and positive allosteric modulator (PAM) of α7 PAM PNU 120596 (10 μM) was carried out. This combination uncovers the full activity range of α7nAChR. The specificity of α7 mediated effects was validated with α7nAChR blockers MLA and α-BungTX. As discussed below, it was determined that treatment with a non-aggregating analogue of Aβ42 enhances α7 nAChR mediated Ca⁺² influx, showing that co-application of the non-aggregating analogs of Aβ42 at pM concentration promotes/facilitates/enhances the ability of PAM PNU 120596 to activate α7 receptor, which suggests that the non-aggregating analogue of Aβ42 functions as a positive modulators of the receptor activity. The middle bar in each figure (PNU4) represents the percentage of enhancement in Ca⁺² influx mediated by the non-aggregating peptide analogue compared to the baseline signal before (PNU3) and after (PNU5) application.

[0110] FIGS. 11A-11D show the percentage of facilitation of α7 nicotinic acetylcholine receptors in cortical neurons in comparison with pre- and post-control responses for an example non-aggregating peptide analogue having the amino acid sequence of SEQ ID NO: 88 at the indicated concentrations. FIGS. 12A-12D and 13 show the percentage of facilitation of α7 nicotinic acetylcholine receptors in cortical neurons in comparison with pre- and post-control responses for additional example non-aggregating peptide analogues having the amino acid sequences of SEQ ID NO:3 and SEQ ID NO: 190, respectively, at the indicated concentrations. FIG. 14 shows the percentage facilitation of α7 nicotinic acetylcholine receptors in cortical neurons in comparison with pre- and post-control responses for Aβ42 having SEQ ID NO:1, and FIGS. 15A-15D shows the percentage of facilitation of α7 nicotinic acetylcholine receptors in cortical neurons in comparison with pre- and post-control responses for a control scrambled peptide having the amino acid sequence of SEQ ID NO:711.

[0111] These results show that co-application of non-aggregating analogues at pM concentration promotes the ability of PAM PNU 120596 to activate α7 receptor, which without being bound by theory suggests that the analogue functions as a positive modulator of the receptor activity.

[0112] FIG. 16 shows that a non-aggregating peptide analogue having the amino acid sequence of SEQ ID NO:88 or SEQ ID NO: 190 induces downstream ERK1/2 phosphorylation in SHSY-5Y cells after 5 minutes of treatment with the peptide at pM concentrations. Phosphorylation of ERK is important for cell proliferation, neurogenesis and synaptic plasticity, and is downstream of calcium influx through the α7 receptor. To obtain the data shown in FIG. 16, SH-SY5Y cells were treated with 30 pM peptide for 5 minutes, then lysed and ERK phosphorylation quantified via a commercial ELISA kit. The results shown in FIG. 16 demonstrate that the tested non-aggregating analogues of Aβ42 activate the neurogenic signaling pathways mediated by α7 binding and Ca⁺² influx. Although Aβ42 was not used as a control in FIG. 16, parallel experiments comparing the activity of Aβ42 against the non-aggregating peptide analogues showed higher activity on the part of the non-aggregating peptide analogues.

### Example 6—Structural Studies

[0113] FIG. 17 shows the results of docking simulations showing that a peptide having the amino acid sequence of SEQ ID NO:88 binds to the α7 nicotinic acetylcholine receptor via the N-terminal domain of the peptide analogue. The peptide is visible on the right-hand side of the figure where the N-terminal portion of the peptide is received within a binding pocket formed within the extracellular domain of the α7 receptor. Without being bound by theory, the fact that binding to the α7 receptor occurs via the N-terminal domain of the peptide analogue, whereas the C-terminal domain is the beta-sheet aggregation domain, is believed to support that making modifications at the C-terminal portion of the peptide is less likely to interfere with the normal biological function of the Aβ42 peptide.

[0114] FIG. 18 shows a structural representation of the oppositely stacked beta-sheets of the Aβ42 peptide that are believed to form the protofilaments that form amyloid deposits in Alzheimer's disease. The position occupied by methionine 35 in each of the oppositely stacked beta-sheets is circled and indicated by an arrow to show the position of this residue in stabilizing the cross-β amyloid conformation.

[0115] The foregoing examples demonstrate that administration of a non-aggregating analogue of Aβ42 can be used to ameliorate symptoms of Alzheimer's disease in an accepted animal model for the disease. Based on these results, it can be soundly predicted that the use of non-aggregating analogues of other proteins implicated in various proteinopathies can be used in the treatment and/or prophylaxis of such proteinopathies.

[0116] While a number of exemplary aspects and embodiments have been discussed above, those of skill in the art will recognize certain modifications, permutations, additions and sub-combinations thereof. It is therefore intended that the following appended claims and claims hereafter introduced are interpreted to include all such modifications, permutations, additions and sub-combinations as are consistent with the broadest interpretation of the specification as a whole.

### REFERENCES

[0117] The following references are of potential interest with respect to the subject matter described herein. Each of the following references is incorporated by reference herein in its entirety.
[0118] Kanaan and Manfredsson, Journal of Parkinson's Disease 2:249-267 (2012).
[0119] Malmberg et al., Frontiers in Neuroscience, 14:256 (2020).
[0120] Wood et al., Biochemistry, 34 (3): 724-30 (1995).
[0121] Chiti and Dobson, Annu. Rev. Biochem. 86:26-68 (2017).
[0122] US 2008/0063636 to Mori et al.
[0123] US 2010/0081613 to Arancio et al.
[0124] U.S. Pat. No. 6,689,753 to Soto-Jara
[0125] U.S. Pat. No. 7,342,091 to Kapurniotu et al.
[0126] WO 03/045128 to Frangione et al.
[0127] U.S. Pat. No. 5,686,411 to Gaeta et al.

[0128] Certain embodiments are further defined with reference to the following aspects, which are illustrative and not limiting in scope.
[0129] A. A non-aggregating protein analogue of a protein involved in a proteinopathy, the protein having a beta-sheet aggregation domain and the non-aggregating protein analogue comprising a beta-sheet destabilizing mutation in the beta-sheet aggregation domain, the non-aggregating protein analogue retaining substantially the wild type function of the protein.
[0130] B. A non-aggregating protein analogue as defined in the preceding aspect, comprising two or more beta-sheet destabilizing mutations in the beta-sheet aggregation domain.
[0131] C. A non-aggregating protein analogue as defined in any one of the preceding aspects, wherein the beta-sheet destabilizing mutation comprises substitution of a naturally occurring amino acid residue of the protein involved in the proteinopathy with a charged or polar amino acid residue, a glycine residue, a proline residue, or a beta-sheet destabilizing analogue of an amino acid.
[0132] D. A non-aggregating protein analogue as defined in the preceding aspect, wherein the charged or polar amino acid residue or analogue thereof comprises K, R, H, E, D, S, T, N, Q, C, or with an amino acid analogue that interferes with beta-sheet formation within the beta-sheet aggregation domain, wherein said amino acid analogues that interfere with beta-sheet formation are optionally 3-hydroxyproline, 4-hydroxyproline, selenocysteine, pyroglutamic acid, carboxyglutamic acid, octenyl alanine, pyrrolysine, palmitoyl aspartate, D-amino acids including D-proline, β-amino acids, γ-amino acids, Homo-amino acids, β-Homo-amino acids, α-methyl amino acids, N-methyl amino acids, N-ethyl amino acids, N-alkylated amino acid derivatives (preferably with 1, 2 or 3 carbons in the alkyl moiety), pyruvic acid derivatives, branched-chain amino acid derivatives, nitro amino acid derivatives, halogenated amino acid derivatives, ring-substituted amino acid derivatives, aromatic amino acid derivatives, linear core amino acids, peptoid derivatives, hydroxylated amino acid derivatives, cyclic amino acids, bicyclic amino acids, 3-amino-3-aryl-propionic acids, 3-amino-4-aryl-butyric acids, amino acids with aromatic spacers, alicyclic amino acids, or α-phenylglycine derivatives.
[0133] E. A non-aggregating protein analogue as defined in any one of the preceding aspects, wherein the beta-sheet destabilizing mutation comprises deletion of one or more naturally occurring amino acid residues of the protein involved in the proteinopathy, optionally including the deletion of up to or including all of the naturally occurring amino acid residues of the beta-sheet aggregation domain.
[0134] F. A non-aggregating protein analogue as defined in any one of the preceding aspects, wherein the beta-sheet destabilizing mutation comprises insertion of between one and five amino acid residues.
[0135] G. A non-aggregating protein analogue as defined in the preceding claim, wherein at least one of the inserted amino acid residues comprises K, R, H, E, D, S, T, N, Q, C, P or G, or an amino acid analogue that interferes with beta-sheet formation.
[0136] H. A non-aggregating protein analogue as defined in any one of the preceding aspects, wherein the protein involved in the proteinopathy comprises amyloid precursor protein (APP), amyloid beta protein (including Aβ-39, Aβ-40, Aβ-42 or Aβ-43 isoforms), alpha-synuclein, prion protein, Huntingtin protein, p53, or any of the proteins or peptides listed in Table 1.
[0137] I. A non-aggregating protein analogue as defined in any one of the preceding aspects, wherein the protein involved in the proteinopathy comprises amyloid beta, wherein optionally:
   [0138] the beta-sheet aggregation domain comprises positions 29-42 of the amyloid beta;
   [0139] the beta-sheet destabilizing mutation comprises a deletion or substitution of one of the following amino acid residues for the naturally occurring amino acid residue: G, P, K, R, H, E, D, S, T, N, Q, C, or an amino acid analogue that interferes with beta-sheet formation;
   [0140] the beta-sheet destabilizing mutation comprises an insertion of between one and five amino acid residues adjacent to the naturally occurring amino acid, optionally wherein at least one of the inserted amino acid residues comprises G, P, K, R, H, E, D, S, T, N, Q, C, or an amino acid analogue that interferes with beta-sheet formation;
   [0141] the non-aggregating protein analogue comprises a protein having the amino acid sequence set forth in any one of SEQ ID NO:2-193; and/or
   [0142] the non-aggregating protein analogue comprises a protein having the amino acid sequence set forth in any one of SEQ ID NOs: 194-207 or SEQ ID NOs: 712-742, wherein the X denotes a deletion, insertion of between one and five amino acid residues, optionally G, P, K, R, H, E, D, S, T, N, Q, C, or an amino acid analogue that interferes with beta-sheet formation, or substitution of one of the following amino acid residues for the naturally occurring amino acid: G, P, K, R, H, E, D, S, T, N, Q, C, or an amino acid analogue that interferes with beta-sheet formation.
[0143] J. A non-aggregating protein analogue as defined in any one of the preceding aspects, wherein the protein involved in the proteinopathy comprises alpha-synuclein, wherein optionally:
   [0144] the beta-sheet aggregation domain comprises positions 61-95 of the alpha-synuclein;
   [0145] the beta-sheet destabilizing mutation comprises a deletion or substitution of one of the following amino acid residues for the naturally occurring amino acid residue: G, P, K, R, H, E, D, S, T, N, Q, C, or an amino acid analogue that interferes with beta-sheet formation;
   [0146] the beta-sheet destabilizing mutation comprises an insertion of between one and five amino acid residues adjacent to the naturally occurring amino acid, optionally wherein at least one of the inserted amino acid residues comprises G, P, K, R, H, E, D, S, T, N, Q, C, or an amino acid analogue that interferes with beta-sheet formation;
   [0147] the non-aggregating protein analogue comprises a protein having the amino acid sequence set forth in any one of SEQ ID NO:209-698, wherein the X denotes a deletion, insertion of between one and five amino acid residues, optionally G, P, K, R, H, E, D, S, T, N, Q, C, or an amino acid analogue that interferes with beta-sheet formation, or substitution of one of the following amino acid residues for the naturally occurring amino acid: G, P, K, R, H, E, D, S, T, N, Q, C, or an amino acid analogue that interferes with beta-sheet formation.
[0148] K. A non-aggregating protein analogue as defined in any one of the preceding aspects, wherein the protein involved in the proteinopathy comprises prion protein, wherein optionally:
   [0149] the beta-sheet aggregation domain comprises positions 109-121 of the prion protein;
   [0150] the beta-sheet destabilizing mutation comprises a deletion or substitution of one of the following amino acid residues for the naturally occurring amino acid residue: G, P, K, R, H, E, D, S, T, N, Q, C, or an amino acid analogue that interferes with beta-sheet formation;
   [0151] the beta-sheet destabilizing mutation comprises an insertion of between one and five amino acid residues adjacent to the naturally occurring amino acid, optionally wherein at least one of the inserted amino acid residues comprises G, P, K, R, H, E, D, S, T, N, Q, C, or an amino acid analogue that interferes with beta-sheet formation; and/or
   [0152] the non-aggregating protein analogue comprises a protein having the amino acid sequence set forth in any one of SEQ ID NO:700-710, wherein the X denotes a deletion, insertion of between one and five amino acid residues, optionally G, P, K, R, H, E, D, S, T, N, Q, C, or an amino acid analogue that interferes with beta-sheet formation, or substitution of one of the following amino acid residues for the naturally occurring amino acid: G, P, K, R, H, E, D, S, T, N, Q, C, or an amino acid analogue that interferes with beta-sheet formation.
[0153] L. A nucleic acid encoding the non-aggregating protein analogue as defined in any one of the preceding aspects.
[0154] M. A nucleic acid as defined in the preceding aspect, comprising mRNA.
[0155] N. A liposome-based particle comprising a nucleic acid as defined in any one of the preceding aspects, the liposome-based particle being designed for delivery of the nucleic acid to a target cell to cause expression of the non-aggregating protein analogue.
[0156] O. A method for treatment and/or prophylaxis of a proteinopathy comprising administering to a subject having or at risk of developing the proteinopathy a peptide or nucleic acid as defined in any one of the preceding aspects.
[0157] P. A method as defined in the preceding claim, wherein the proteinopathy comprises Alzheimer's disease, Parkinson's disease, Lewy body disease or Lewy body dementia, Pick's disease, Creutzfeld-Jakob disease, Huntington's disease, amyotrophic lateral sclerosis (ALS), Down syndrome, neuronal degeneration with brain iron accumulation type I (Hallervorde-Spatz disease), Kuru or other transmissible spongiform encephalopathy (TSE), mild cognitive impairment (MCI), cerebral amyloid angiopathy (CAA), vascular dementias, or any neurodegenerative disease characterized by abnormal amyloid deposition, or any of the diseases or disorders listed in Table 1.
[0158] Q. A method as defined in any one of the preceding aspects, wherein administration is by intravenous, intracerebroventricular, intracerebral, intrathecal, intraperitoneal, intramuscular or intravenous injection, infusion, or topical, nasal, oral (including sublingual or buccal), anal, ocular or otic delivery; by liposome-mediated delivery including by direct delivery of the non-aggregating protein analogue as defined in any one of the preceding claims, direct delivery of a mRNA encoding the non-aggregating protein analogue as defined in any one of the preceding claims, or delivery of DNA encoding the non-aggregating protein analogue as defined in any one of the preceding claims together with suitable mechanisms (e.g. CRISPR-Cas gene editing systems) to integrate the DNA into the genome of the cell to facilitate expression of the non-aggregating protein analogue by the cell.
[0159] R. A method of designing a non-aggregating analogue of a protein implicated in a proteinopathy comprising the steps of:
   [0160] selecting the protein implicated in the proteinopathy;
   [0161] identifying a beta-sheet aggregation domain of the protein implicated in the proteinopathy; and
   [0162] identifying one or more beta-sheet destabilizing mutations within the beta-sheet aggregation domain.
[0163] S. A method as defined in the preceding aspect, wherein the step of identifying a beta-sheet aggregation domain of the protein implicated in the proteinopathy comprises conducting structural biology studies.
[0164] T. A method as defined in either one of the preceding aspects, wherein the step of identifying one or more beta-sheet destabilizing mutations within the beta-sheet aggregation domain comprises one or more of:
   [0165] deleting a naturally occurring amino acid residue from the beta-sheet aggregation domain and/or;
   [0166] replacing a naturally occurring amino acid residue in the beta-sheet aggregation domain with an amino acid residue that impairs formation of a cross-beta sheet structure.
[0167] U. A method as defined in the preceding aspect, wherein replacing the naturally occurring amino acid reside in the beta-sheet aggregation domain with an amino acid residue that impairs formation of a cross-beta sheet structure comprises replacing the naturally occurring amino acid residue with one of G, P, K, R, H, E, D, S, T, N, Q, or C, with an amino acid analogue that interferes with beta-sheet formation.
[0168] V. A non-aggregating protein analogue or method as defined in any one of the preceding aspects, wherein said amino acid analogues that interfere with beta-sheet formation are optionally 3-hydroxyproline, 4-hydroxyproline, selenocysteine, pyroglutamic acid, carboxyglutamic acid, octenyl alanine, pyrrolysine, palmitoyl aspartate, D-amino acids including D-proline, β-amino acids, γ-amino acids, Homo-amino acids, β-Homo-amino acids, α-methyl amino acids, N-methyl amino acids, N-ethyl amino acids, N-alkylated amino acid derivatives (preferably with 1, 2 or 3 carbons in the alkyl moiety), pyruvic acid derivatives, branched-chain amino acid derivatives, nitro amino acid derivatives, halogenated amino acid derivatives, ring-substituted amino acid derivatives, aromatic amino acid derivatives, linear core amino acids, peptoid derivatives, hydroxylated amino acid derivatives, cyclic amino acids, bicyclic amino acids, 3-amino-3-aryl-propionic acids, 3-amino-4-aryl-butyric acids, amino acids with aromatic spacers, alicyclic amino acids, or α-phenylglycine derivatives.

The application's sequence listing, which the Patent Office published only in electronic form, follows.

SEQUENCE LISTING (742 sequences)

SEQ ID NO: 1 - protein, 42 aa, Homo sapiens [sequence omitted]

SEQ ID NO: 2 - protein, 41 aa, Artificial Sequence
  Synthetic Construct
DAEFRHDSGYEVHHQKLVFFAEDVGSNKGAIIGLMVGGVVI

SEQ ID NO: 3 - protein, 40 aa, Artificial Sequence
  Synthetic Construct
DAEFRHDSGYEVHHQKLVFFAEDVGSNKGAIIGLMVGGVV

SEQ ID NO: 4 - protein, 39 aa, Artificial Sequence
  Synthetic Construct
DAEFRHDSGYEVHHQKLVFFAEDVGSNKGAIIGLMVGGV

SEQ ID NO: 5 - protein, 38 aa, Artificial Sequence
  Synthetic Construct
DAEFRHDSGYEVHHQKLVFFAEDVGSNKGAIIGLMVGG

SEQ ID NO: 6 - protein, 37 aa, Artificial Sequence
  Synthetic Construct
DAEFRHDSGYEVHHQKLVFFAEDVGSNKGAIIGLMVG

SEQ ID NO: 7 - protein, 36 aa, Artificial Sequence
  Synthetic Construct
DAEFRHDSGYEVHHQKLVFFAEDVGSNKGAIIGLMV

SEQ ID NO: 8 - protein, 35 aa, Artificial Sequence
  Synthetic Construct
DAEFRHDSGYEVHHQKLVFFAEDVGSNKGAIIGLM

SEQ ID NO: 9 - protein, 34 aa, Artificial Sequence
  Synthetic Construct
DAEFRHDSGYEVHHQKLVFFAEDVGSNKGAIIGL

SEQ ID NO: 10 - protein, 33 aa, Artificial Sequence
  Synthetic Construct
DAEFRHDSGYEVHHQKLVFFAEDVGSNKGAIIG

SEQ ID NO: 11 - protein, 32 aa, Artificial Sequence
  Synthetic Construct
DAEFRHDSGYEVHHQKLVFFAEDVGSNKGAII

SEQ ID NO: 12 - protein, 31 aa, Artificial Sequence
  Synthetic Construct
DAEFRHDSGYEVHHQKLVFFAEDVGSNKGAI

SEQ ID NO: 13 - protein, 30 aa, Artificial Sequence
  Synthetic Construct
DAEFRHDSGYEVHHQKLVFFAEDVGSNKGA

SEQ ID NO: 14 - protein, 29 aa, Artificial Sequence
  Synthetic Construct
DAEFRHDSGYEVHHQKLVFFAEDVGSNKG

SEQ ID NO: 15 - protein, 28 aa, Artificial Sequence
  Synthetic Construct
DAEFRHDSGYEVHHQKLVFFAEDVGSNK

SEQ ID NO: 16 - protein, 42 aa, Artificial Sequence
  Synthetic Construct
DAEFRHDSGYEVHHQKLVFFAEDVGSNKPAIIGLMVGGVVIA

SEQ ID NO: 17 - protein, 42 aa, Artificial Sequence [sequence omitted]

SEQ ID NO: 18 - protein, 42 aa, Artificial Sequence
  Synthetic Construct
DAEFRHDSGYEVHHQKLVFFAEDVGSNKKAIIGLMVGGVVIA

SEQ ID NO: 19 - protein, 42 aa, Artificial Sequence
  Synthetic Construct
DAEFRHDSGYEVHHQKLVFFAEDVGSNKRAIIGLMVGGVVIA

SEQ ID NO: 20 - protein, 42 aa, Artificial Sequence
  Synthetic Construct
DAEFRHDSGYEVHHQKLVFFAEDVGSNKHAIIGLMVGGVVIA

SEQ ID NO: 21 - protein, 42 aa, Artificial Sequence
  Synthetic Construct
DAEFRHDSGYEVHHQKLVFFAEDVGSNKEAIIGLMVGGVVIA

SEQ ID NO: 22 - protein, 42 aa, Artificial Sequence
  Synthetic Construct
DAEFRHDSGYEVHHQKLVFFAEDVGSNKDAIIGLMVGGVVIA

SEQ ID NO: 23 - protein, 42 aa, Artificial Sequence
  Synthetic Construct
DAEFRHDSGYEVHHQKLVFFAEDVGSNKSAIIGLMVGGVVIA

SEQ ID NO: 24 - protein, 42 aa, Artificial Sequence
  Synthetic Construct
DAEFRHDSGYEVHHQKLVFFAEDVGSNKTAIIGLMVGGVVIA

SEQ ID NO: 25 - protein, 42 aa, Artificial Sequence
  Synthetic Construct
DAEFRHDSGYEVHHQKLVFFAEDVGSNKNAIIGLMVGGVVIA

SEQ ID NO: 26 - protein, 42 aa, Artificial Sequence
  Synthetic Construct
DAEFRHDSGYEVHHQKLVFFAEDVGSNKQAIIGLMVGGVVIA

SEQ ID NO: 27 - protein, 42 aa, Artificial Sequence
  Synthetic Construct
DAEFRHDSGYEVHHQKLVFFAEDVGSNKCAIIGLMVGGVVIA

SEQ ID NO: 28 - protein, 42 aa, Artificial Sequence
  Synthetic Construct
DAEFRHDSGYEVHHQKLVFFAEDVGSNKGPIIGLMVGGVVIA

SEQ ID NO: 29 - protein, 42 aa, Artificial Sequence
  Synthetic Construct
DAEFRHDSGYEVHHQKLVFFAEDVGSNKGGIIGLMVGGVVIA

SEQ ID NO: 30 - protein, 42 aa, Artificial Sequence
  Synthetic Construct
DAEFRHDSGYEVHHQKLVFFAEDVGSNKGKIIGLMVGGVVIA

SEQ ID NO: 31 - protein, 42 aa, Artificial Sequence
  Synthetic Construct
DAEFRHDSGYEVHHQKLVFFAEDVGSNKGRIIGLMVGGVVIA

SEQ ID NO: 32 - protein, 42 aa, Artificial Sequence
  Synthetic Construct
DAEFRHDSGYEVHHQKLVFFAEDVGSNKGHIIGLMVGGVVIA

SEQ ID NO: 33 - protein, 42 aa, Artificial Sequence
  Synthetic Construct
DAEFRHDSGYEVHHQKLVFFAEDVGSNKGEIIGLMVGGVVIA

SEQ ID NO: 34 - protein, 42 aa, Artificial Sequence
  Synthetic Construct
DAEFRHDSGYEVHHQKLVFFAEDVGSNKGDIIGLMVGGVVIA

SEQ ID NO: 35 - protein, 42 aa, Artificial Sequence
  Synthetic Construct
DAEFRHDSGYEVHHQKLVFFAEDVGSNKGSIIGLMVGGVVIA

SEQ ID NO: 36 - protein, 42 aa, Artificial Sequence
  Synthetic Construct
DAEFRHDSGYEVHHQKLVFFAEDVGSNKGTIIGLMVGGVVIA

SEQ ID NO: 37 - protein, 42 aa, Artificial Sequence
  Synthetic Construct
DAEFRHDSGYEVHHQKLVFFAEDVGSNKGNIIGLMVGGVVIA

SEQ ID NO: 38 - protein, 42 aa, Artificial Sequence
  Synthetic Construct
DAEFRHDSGYEVHHQKLVFFAEDVGSNKGQIIGLMVGGVVIA

SEQ ID NO: 39 - protein, 42 aa, Artificial Sequence
  Synthetic Construct
DAEFRHDSGYEVHHQKLVFFAEDVGSNKGCIIGLMVGGVVIA

SEQ ID NO: 40 - protein, 42 aa, Artificial Sequence
  Synthetic Construct
DAEFRHDSGYEVHHQKLVFFAEDVGSNKGAPIGLMVGGVVIA

SEQ ID NO: 41 - protein, 42 aa, Artificial Sequence
  Synthetic Construct
DAEFRHDSGYEVHHQKLVFFAEDVGSNKGAGIGLMVGGVVIA

SEQ ID NO: 42 - protein, 42 aa, Artificial Sequence
  Synthetic Construct
DAEFRHDSGYEVHHQKLVFFAEDVGSNKGAKIGLMVGGVVIA

SEQ ID NO: 43 - protein, 42 aa, Artificial Sequence
  Synthetic Construct
DAEFRHDSGYEVHHQKLVFFAEDVGSNKGARIGLMVGGVVIA

SEQ ID NO: 44 - protein, 42 aa, Artificial Sequence
  Synthetic Construct
DAEFRHDSGYEVHHQKLVFFAEDVGSNKGAHIGLMVGGVVIA

SEQ ID NO: 45 - protein, 42 aa, Artificial Sequence
  Synthetic Construct
DAEFRHDSGYEVHHQKLVFFAEDVGSNKGAEIGLMVGGVVIA

SEQ ID NO: 46 - protein, 42 aa, Artificial Sequence
  Synthetic Construct
DAEFRHDSGYEVHHQKLVFFAEDVGSNKGADIGLMVGGVVIA

SEQ ID NO: 47 - protein, 42 aa, Artificial Sequence
  Synthetic Construct
DAEFRHDSGYEVHHQKLVFFAEDVGSNKGASIGLMVGGVVIA

SEQ ID NO: 48 - protein, 42 aa, Artificial Sequence
  Synthetic Construct
DAEFRHDSGYEVHHQKLVFFAEDVGSNKGATIGLMVGGVVIA

SEQ ID NO: 49 - protein, 42 aa, Artificial Sequence
  Synthetic Construct
DAEFRHDSGYEVHHQKLVFFAEDVGSNKGANIGLMVGGVVIA

SEQ ID NO: 50 - protein, 42 aa, Artificial Sequence
  Synthetic Construct
DAEFRHDSGYEVHHQKLVFFAEDVGSNKGAQIGLMVGGVVIA

SEQ ID NO: 51 - protein, 42 aa, Artificial Sequence
  Synthetic Construct
DAEFRHDSGYEVHHQKLVFFAEDVGSNKGACIGLMVGGVVIA

SEQ ID NO: 52 - protein, 42 aa, Artificial Sequence
  Synthetic Construct
DAEFRHDSGYEVHHQKLVFFAEDVGSNKGAIPGLMVGGVVIA

SEQ ID NO: 53 - protein, 42 aa, Artificial Sequence
  Synthetic Construct
DAEFRHDSGYEVHHQKLVFFAEDVGSNKGAIGGLMVGGVVIA

SEQ ID NO: 54 - protein, 42 aa, Artificial Sequence
  Synthetic Construct
DAEFRHDSGYEVHHQKLVFFAEDVGSNKGAIKGLMVGGVVIA

SEQ ID NO: 55 - protein, 42 aa, Artificial Sequence
  Synthetic Construct
DAEFRHDSGYEVHHQKLVFFAEDVGSNKGAIRGLMVGGVVIA

SEQ ID NO: 56 - protein, 42 aa, Artificial Sequence
  Synthetic Construct
DAEFRHDSGYEVHHQKLVFFAEDVGSNKGAIHGLMVGGVVIA

SEQ ID NO: 57 - protein, 42 aa, Artificial Sequence
  Synthetic Construct
DAEFRHDSGYEVHHQKLVFFAEDVGSNKGAIEGLMVGGVVIA

SEQ ID NO: 58 - protein, 42 aa, Artificial Sequence
  Synthetic Construct
DAEFRHDSGYEVHHQKLVFFAEDVGSNKGAIDGLMVGGVVIA

SEQ ID NO: 59 - protein, 42 aa, Artificial Sequence
  Synthetic Construct
DAEFRHDSGYEVHHQKLVFFAEDVGSNKGAISGLMVGGVVIA

SEQ ID NO: 60 - protein, 42 aa, Artificial Sequence
  Synthetic Construct
DAEFRHDSGYEVHHQKLVFFAEDVGSNKGAITGLMVGGVVIA

SEQ ID NO: 61 - protein, 42 aa, Artificial Sequence
  Synthetic Construct
DAEFRHDSGYEVHHQKLVFFAEDVGSNKGAINGLMVGGVVIA

SEQ ID NO: 62 - protein, 42 aa, Artificial Sequence
  Synthetic Construct
DAEFRHDSGYEVHHQKLVFFAEDVGSNKGAIQGLMVGGVVIA

SEQ ID NO: 63 - protein, 42 aa, Artificial Sequence
  Synthetic Construct
DAEFRHDSGYEVHHQKLVFFAEDVGSNKGAICGLMVGGVVIA

SEQ ID NO: 64 - protein, 42 aa, Artificial Sequence
  Synthetic Construct
DAEFRHDSGYEVHHQKLVFFAEDVGSNKGAIIPLMVGGVVIA

SEQ ID NO: 65 - protein, 42 aa, Artificial Sequence [sequence omitted]

SEQ ID NO: 66 - protein, 42 aa, Artificial Sequence
  Synthetic Construct
DAEFRHDSGYEVHHQKLVFFAEDVGSNKGAIIKLMVGGVVIA

SEQ ID NO: 67 - protein, 42 aa, Artificial Sequence
  Synthetic Construct
DAEFRHDSGYEVHHQKLVFFAEDVGSNKGAIIRLMVGGVVIA

SEQ ID NO: 68 - protein, 42 aa, Artificial Sequence
  Synthetic Construct
DAEFRHDSGYEVHHQKLVFFAEDVGSNKGAIIHLMVGGVVIA

SEQ ID NO: 69 - protein, 42 aa, Artificial Sequence
  Synthetic Construct
DAEFRHDSGYEVHHQKLVFFAEDVGSNKGAIIELMVGGVVIA

SEQ ID NO: 70 - protein, 42 aa, Artificial Sequence
  Synthetic Construct
DAEFRHDSGYEVHHQKLVFFAEDVGSNKGAIIDLMVGGVVIA

SEQ ID NO: 71 - protein, 42 aa, Artificial Sequence
  Synthetic Construct
DAEFRHDSGYEVHHQKLVFFAEDVGSNKGAIISLMVGGVVIA

SEQ ID NO: 72 - protein, 42 aa, Artificial Sequence
  Synthetic Construct
DAEFRHDSGYEVHHQKLVFFAEDVGSNKGAIITLMVGGVVIA

SEQ ID NO: 73 - protein, 42 aa, Artificial Sequence
  Synthetic Construct
DAEFRHDSGYEVHHQKLVFFAEDVGSNKGAIINLMVGGVVIA

SEQ ID NO: 74 - protein, 42 aa, Artificial Sequence
  Synthetic Construct
DAEFRHDSGYEVHHQKLVFFAEDVGSNKGAIIQLMVGGVVIA

SEQ ID NO: 75 - protein, 42 aa, Artificial Sequence
  Synthetic Construct
DAEFRHDSGYEVHHQKLVFFAEDVGSNKGAIICLMVGGVVIA

SEQ ID NO: 76 - protein, 42 aa, Artificial Sequence
  Synthetic Construct
DAEFRHDSGYEVHHQKLVFFAEDVGSNKGAIIGPMVGGVVIA

SEQ ID NO: 77 - protein, 42 aa, Artificial Sequence
  Synthetic Construct
DAEFRHDSGYEVHHQKLVFFAEDVGSNKGAIIGGMVGGVVIA

SEQ ID NO: 78 - protein, 42 aa, Artificial Sequence
  Synthetic Construct
DAEFRHDSGYEVHHQKLVFFAEDVGSNKGAIIGKMVGGVVIA

SEQ ID NO: 79 - protein, 42 aa, Artificial Sequence
  Synthetic Construct
DAEFRHDSGYEVHHQKLVFFAEDVGSNKGAIIGRMVGGVVIA

SEQ ID NO: 80 - protein, 42 aa, Artificial Sequence
  Synthetic Construct
DAEFRHDSGYEVHHQKLVFFAEDVGSNKGAIIGHMVGGVVIA

SEQ ID NO: 81 - protein, 42 aa, Artificial Sequence
  Synthetic Construct
DAEFRHDSGYEVHHQKLVFFAEDVGSNKGAIIGEMVGGVVIA

SEQ ID NO: 82 - protein, 42 aa, Artificial Sequence
  Synthetic Construct
DAEFRHDSGYEVHHQKLVFFAEDVGSNKGAIIGDMVGGVVIA

SEQ ID NO: 83 - protein, 42 aa, Artificial Sequence
  Synthetic Construct
DAEFRHDSGYEVHHQKLVFFAEDVGSNKGAIIGSMVGGVVIA

SEQ ID NO: 84 - protein, 42 aa, Artificial Sequence
  Synthetic Construct
DAEFRHDSGYEVHHQKLVFFAEDVGSNKGAIIGTMVGGVVIA

SEQ ID NO: 85 - protein, 42 aa, Artificial Sequence
  Synthetic Construct
DAEFRHDSGYEVHHQKLVFFAEDVGSNKGAIIGNMVGGVVIA

SEQ ID NO: 86 - protein, 42 aa, Artificial Sequence
  Synthetic Construct
DAEFRHDSGYEVHHQKLVFFAEDVGSNKGAIIGQMVGGVVIA

SEQ ID NO: 87 - protein, 42 aa, Artificial Sequence
  Synthetic Construct
DAEFRHDSGYEVHHQKLVFFAEDVGSNKGAIIGCMVGGVVIA

SEQ ID NO: 88 - protein, 42 aa, Artificial Sequence
  Synthetic Construct
DAEFRHDSGYEVHHQKLVFFAEDVGSNKGAIIGLPVGGVVIA

SEQ ID NO: 89 - protein, 42 aa, Artificial Sequence
  Synthetic Construct
DAEFRHDSGYEVHHQKLVFFAEDVGSNKGAIIGLGVGGVVIA

SEQ ID NO: 90 - protein, 42 aa, Artificial Sequence
  Synthetic Construct
DAEFRHDSGYEVHHQKLVFFAEDVGSNKGAIIGLKVGGVVIA

SEQ ID NO: 91 - protein, 42 aa, Artificial Sequence
  Synthetic Construct
DAEFRHDSGYEVHHQKLVFFAEDVGSNKGAIIGLRVGGVVIA

SEQ ID NO: 92 - protein, 42 aa, Artificial Sequence
  Synthetic Construct
DAEFRHDSGYEVHHQKLVFFAEDVGSNKGAIIGLHVGGVVIA

SEQ ID NO: 93 - protein, 42 aa, Artificial Sequence
  Synthetic Construct
DAEFRHDSGYEVHHQKLVFFAEDVGSNKGAIIGLEVGGVVIA

SEQ ID NO: 94 - protein, 42 aa, Artificial Sequence
  Synthetic Construct
DAEFRHDSGYEVHHQKLVFFAEDVGSNKGAIIGLDVGGVVIA

SEQ ID NO: 95 - protein, 42 aa, Artificial Sequence
  Synthetic Construct
DAEFRHDSGYEVHHQKLVFFAEDVGSNKGAIIGLSVGGVVIA

SEQ ID NO: 96 - protein, 42 aa, Artificial Sequence
  Synthetic Construct
DAEFRHDSGYEVHHQKLVFFAEDVGSNKGAIIGLTVGGVVIA

SEQ ID NO: 97 - protein, 42 aa, Artificial Sequence
  Synthetic Construct
DAEFRHDSGYEVHHQKLVFFAEDVGSNKGAIIGLNVGGVVIA

SEQ ID NO: 98 - protein, 42 aa, Artificial Sequence
  Synthetic Construct
DAEFRHDSGYEVHHQKLVFFAEDVGSNKGAIIGLQVGGVVIA

SEQ ID NO: 99 - protein, 42 aa, Artificial Sequence
  Synthetic Construct
DAEFRHDSGYEVHHQKLVFFAEDVGSNKGAIIGLCVGGVVIA

SEQ ID NO: 100 - protein, 42 aa, Artificial Sequence
  Synthetic Construct
DAEFRHDSGYEVHHQKLVFFAEDVGSNKGAIIGLMPGGVVIA

SEQ ID NO: 101 - protein, 42 aa, Artificial Sequence
  Synthetic Construct
DAEFRHDSGYEVHHQKLVFFAEDVGSNKGAIIGLMGGGVVIA

SEQ ID NO: 102 - protein, 42 aa, Artificial Sequence
  Synthetic Construct
DAEFRHDSGYEVHHQKLVFFAEDVGSNKGAIIGLMKGGVVIA

SEQ ID NO: 103 - protein, 42 aa, Artificial Sequence
  Synthetic Construct
DAEFRHDSGYEVHHQKLVFFAEDVGSNKGAIIGLMRGGVVIA

SEQ ID NO: 104 - protein, 42 aa, Artificial Sequence
  Synthetic Construct
DAEFRHDSGYEVHHQKLVFFAEDVGSNKGAIIGLMHGGVVIA

SEQ ID NO: 105 - protein, 42 aa, Artificial Sequence
  Synthetic Construct
DAEFRHDSGYEVHHQKLVFFAEDVGSNKGAIIGLMEGGVVIA

SEQ ID NO: 106 - protein, 42 aa, Artificial Sequence
  Synthetic Construct
DAEFRHDSGYEVHHQKLVFFAEDVGSNKGAIIGLMDGGVVIA

SEQ ID NO: 107 - protein, 42 aa, Artificial Sequence
  Synthetic Construct
DAEFRHDSGYEVHHQKLVFFAEDVGSNKGAIIGLMSGGVVIA

SEQ ID NO: 108 - protein, 42 aa, Artificial Sequence
  Synthetic Construct
DAEFRHDSGYEVHHQKLVFFAEDVGSNKGAIIGLMTGGVVIA

SEQ ID NO: 109 - protein, 42 aa, Artificial Sequence
  Synthetic Construct
DAEFRHDSGYEVHHQKLVFFAEDVGSNKGAIIGLMNGGVVIA

SEQ ID NO: 110 - protein, 42 aa, Artificial Sequence
  Synthetic Construct
DAEFRHDSGYEVHHQKLVFFAEDVGSNKGAIIGLMQGGVVIA

SEQ ID NO: 111 - protein, 42 aa, Artificial Sequence
  Synthetic Construct
DAEFRHDSGYEVHHQKLVFFAEDVGSNKGAIIGLMCGGVVIA

SEQ ID NO: 112 - protein, 42 aa, Artificial Sequence
  Synthetic Construct
DAEFRHDSGYEVHHQKLVFFAEDVGSNKGAIIGLMVPGVVIA

SEQ ID NO: 113 - protein, 42 aa, Artificial Sequence [sequence omitted]

SEQ ID NO: 114 - protein, 42 aa, Artificial Sequence
  Synthetic Construct
DAEFRHDSGYEVHHQKLVFFAEDVGSNKGAIIGLMVKGVVIA

SEQ ID NO: 115 - protein, 42 aa, Artificial Sequence
  Synthetic Construct
DAEFRHDSGYEVHHQKLVFFAEDVGSNKGAIIGLMVRGVVIA

SEQ ID NO: 116 - protein, 42 aa, Artificial Sequence
  Synthetic Construct
DAEFRHDSGYEVHHQKLVFFAEDVGSNKGAIIGLMVHGVVIA

SEQ ID NO: 117 - protein, 42 aa, Artificial Sequence
  Synthetic Construct
DAEFRHDSGYEVHHQKLVFFAEDVGSNKGAIIGLMVEGVVIA

SEQ ID NO: 118 - protein, 42 aa, Artificial Sequence
  Synthetic Construct
DAEFRHDSGYEVHHQKLVFFAEDVGSNKGAIIGLMVDGVVIA

SEQ ID NO: 119 - protein, 42 aa, Artificial Sequence
  Synthetic Construct
DAEFRHDSGYEVHHQKLVFFAEDVGSNKGAIIGLMVSGVVIA

SEQ ID NO: 120 - protein, 42 aa, Artificial Sequence
  Synthetic Construct
DAEFRHDSGYEVHHQKLVFFAEDVGSNKGAIIGLMVTGVVIA

SEQ ID NO: 121 - protein, 42 aa, Artificial Sequence
  Synthetic Construct
DAEFRHDSGYEVHHQKLVFFAEDVGSNKGAIIGLMVNGVVIA

SEQ ID NO: 122 - protein, 42 aa, Artificial Sequence
  Synthetic Construct
DAEFRHDSGYEVHHQKLVFFAEDVGSNKGAIIGLMVQGVVIA

SEQ ID NO: 123 - protein, 42 aa, Artificial Sequence
  Synthetic Construct
DAEFRHDSGYEVHHQKLVFFAEDVGSNKGAIIGLMVCGVVIA

SEQ ID NO: 124 - protein, 42 aa, Artificial Sequence
  Synthetic Construct
DAEFRHDSGYEVHHQKLVFFAEDVGSNKGAIIGLMVGPVVIA

SEQ ID NO: 125 - protein, 42 aa, Artificial Sequence [sequence omitted]

SEQ ID NO: 126 - protein, 42 aa, Artificial Sequence
  Synthetic Construct
DAEFRHDSGYEVHHQKLVFFAEDVGSNKGAIIGLMVGKVVIA

SEQ ID NO: 127 - protein, 42 aa, Artificial Sequence
  Synthetic Construct
DAEFRHDSGYEVHHQKLVFFAEDVGSNKGAIIGLMVGRVVIA

SEQ ID NO: 128 - protein, 42 aa, Artificial Sequence
  Synthetic Construct
DAEFRHDSGYEVHHQKLVFFAEDVGSNKGAIIGLMVGHVVIA

SEQ ID NO: 129 - protein, 42 aa, Artificial Sequence
  Synthetic Construct
DAEFRHDSGYEVHHQKLVFFAEDVGSNKGAIIGLMVGEVVIA

SEQ ID NO: 130 - protein, 42 aa, Artificial Sequence
  Synthetic Construct
DAEFRHDSGYEVHHQKLVFFAEDVGSNKGAIIGLMVGDVVIA

SEQ ID NO: 131 - protein, 42 aa, Artificial Sequence
  Synthetic Construct
DAEFRHDSGYEVHHQKLVFFAEDVGSNKGAIIGLMVGSVVIA

SEQ ID NO: 132 - protein, 42 aa, Artificial Sequence
  Synthetic Construct
DAEFRHDSGYEVHHQKLVFFAEDVGSNKGAIIGLMVGTVVIA

SEQ ID NO: 133 - protein, 42 aa, Artificial Sequence
  Synthetic Construct
DAEFRHDSGYEVHHQKLVFFAEDVGSNKGAIIGLMVGNVVIA

SEQ ID NO: 134 - protein, 42 aa, Artificial Sequence
  Synthetic Construct
DAEFRHDSGYEVHHQKLVFFAEDVGSNKGAIIGLMVGQVVIA

SEQ ID NO: 135 - protein, 42 aa, Artificial Sequence
  Synthetic Construct
DAEFRHDSGYEVHHQKLVFFAEDVGSNKGAIIGLMVGCVVIA

SEQ ID NO: 136 - protein, 42 aa, Artificial Sequence
  Synthetic Construct
DAEFRHDSGYEVHHQKLVFFAEDVGSNKGAIIGLMVGGPVIA

SEQ ID NO: 137 - protein, 42 aa, Artificial Sequence
  Synthetic Construct
DAEFRHDSGYEVHHQKLVFFAEDVGSNKGAIIGLMVGGGVIA

SEQ ID NO: 138 - protein, 42 aa, Artificial Sequence
  Synthetic Construct
DAEFRHDSGYEVHHQKLVFFAEDVGSNKGAIIGLMVGGKVIA

SEQ ID NO: 139 - protein, 42 aa, Artificial Sequence
  Synthetic Construct
DAEFRHDSGYEVHHQKLVFFAEDVGSNKGAIIGLMVGGRVIA

SEQ ID NO: 140 - protein, 42 aa, Artificial Sequence
  Synthetic Construct
DAEFRHDSGYEVHHQKLVFFAEDVGSNKGAIIGLMVGGHVIA

SEQ ID NO: 141 - protein, 42 aa, Artificial Sequence
  Synthetic Construct
DAEFRHDSGYEVHHQKLVFFAEDVGSNKGAIIGLMVGGEVIA

SEQ ID NO: 142 - protein, 42 aa, Artificial Sequence
  Synthetic Construct
DAEFRHDSGYEVHHQKLVFFAEDVGSNKGAIIGLMVGGDVIA

SEQ ID NO: 143 - protein, 42 aa, Artificial Sequence
  Synthetic Construct
DAEFRHDSGYEVHHQKLVFFAEDVGSNKGAIIGLMVGGSVIA

SEQ ID NO: 144 - protein, 42 aa, Artificial Sequence
  Synthetic Construct
DAEFRHDSGYEVHHQKLVFFAEDVGSNKGAIIGLMVGGTVIA

SEQ ID NO: 145 - protein, 42 aa, Artificial Sequence
  Synthetic Construct
DAEFRHDSGYEVHHQKLVFFAEDVGSNKGAIIGLMVGGNVIA

SEQ ID NO: 146 - protein, 42 aa, Artificial Sequence
  Synthetic Construct
DAEFRHDSGYEVHHQKLVFFAEDVGSNKGAIIGLMVGGQVIA

SEQ ID NO: 147 - protein, 42 aa, Artificial Sequence
  Synthetic Construct
DAEFRHDSGYEVHHQKLVFFAEDVGSNKGAIIGLMVGGCVIA

SEQ ID NO: 148 - protein, 42 aa, Artificial Sequence
  Synthetic Construct
DAEFRHDSGYEVHHQKLVFFAEDVGSNKGAIIGLMVGGVPIA

SEQ ID NO: 149 - protein, 42 aa, Artificial Sequence
  Synthetic Construct
DAEFRHDSGYEVHHQKLVFFAEDVGSNKGAIIGLMVGGVGIA

SEQ ID NO: 150 - protein, 42 aa, Artificial Sequence
  Synthetic Construct
DAEFRHDSGYEVHHQKLVFFAEDVGSNKGAIIGLMVGGVKIA

SEQ ID NO: 151 - protein, 42 aa, Artificial Sequence
  Synthetic Construct
DAEFRHDSGYEVHHQKLVFFAEDVGSNKGAIIGLMVGGVRIA

SEQ ID NO: 152 - protein, 42 aa, Artificial Sequence
  Synthetic Construct
DAEFRHDSGYEVHHQKLVFFAEDVGSNKGAIIGLMVGGVHIA

SEQ ID NO: 153 - protein, 42 aa, Artificial Sequence
  Synthetic Construct
DAEFRHDSGYEVHHQKLVFFAEDVGSNKGAIIGLMVGGVEIA

SEQ ID NO: 154 - protein, 42 aa, Artificial Sequence
  Synthetic Construct
DAEFRHDSGYEVHHQKLVFFAEDVGSNKGAIIGLMVGGVDIA

SEQ ID NO: 155 - protein, 42 aa, Artificial Sequence
  Synthetic Construct
DAEFRHDSGYEVHHQKLVFFAEDVGSNKGAIIGLMVGGVSIA

SEQ ID NO: 156 - protein, 42 aa, Artificial Sequence
  Synthetic Construct
DAEFRHDSGYEVHHQKLVFFAEDVGSNKGAIIGLMVGGVTIA

SEQ ID NO: 157 - protein, 42 aa, Artificial Sequence
  Synthetic Construct
DAEFRHDSGYEVHHQKLVFFAEDVGSNKGAIIGLMVGGVNIA

SEQ ID NO: 158 - protein, 42 aa, Artificial Sequence
  Synthetic Construct
DAEFRHDSGYEVHHQKLVFFAEDVGSNKGAIIGLMVGGVQIA

SEQ ID NO: 159 - protein, 42 aa, Artificial Sequence
  Synthetic Construct
DAEFRHDSGYEVHHQKLVFFAEDVGSNKGAIIGLMVGGVCIA

SEQ ID NO: 160 - protein, 42 aa, Artificial Sequence
  Synthetic Construct
DAEFRHDSGYEVHHQKLVFFAEDVGSNKGAIIGLMVGGVVPA

SEQ ID NO: 161 - protein, 42 aa, Artificial Sequence
  Synthetic Construct
DAEFRHDSGYEVHHQKLVFFAEDVGSNKGAIIGLMVGGVVGA

SEQ ID NO: 162 - protein, 42 aa, Artificial Sequence
  Synthetic Construct
DAEFRHDSGYEVHHQKLVFFAEDVGSNKGAIIGLMVGGVVKA

SEQ ID NO: 163 - protein, 42 aa, Artificial Sequence
  Synthetic Construct
DAEFRHDSGYEVHHQKLVFFAEDVGSNKGAIIGLMVGGVVRA

SEQ ID NO: 164 - protein, 42 aa, Artificial Sequence
  Synthetic Construct
DAEFRHDSGYEVHHQKLVFFAEDVGSNKGAIIGLMVGGVVHA

SEQ ID NO: 165 - protein, 42 aa, Artificial Sequence
  Synthetic Construct
DAEFRHDSGYEVHHQKLVFFAEDVGSNKGAIIGLMVGGVVEA

SEQ ID NO: 166 - protein, 42 aa, Artificial Sequence
  Synthetic Construct
DAEFRHDSGYEVHHQKLVFFAEDVGSNKGAIIGLMVGGVVDA

SEQ ID NO: 167 - protein, 42 aa, Artificial Sequence
  Synthetic Construct
DAEFRHDSGYEVHHQKLVFFAEDVGSNKGAIIGLMVGGVVSA

SEQ ID NO: 168 - protein, 42 aa, Artificial Sequence
  Synthetic Construct
DAEFRHDSGYEVHHQKLVFFAEDVGSNKGAIIGLMVGGVVTA

SEQ ID NO: 169 - protein, 42 aa, Artificial Sequence
  Synthetic Construct
DAEFRHDSGYEVHHQKLVFFAEDVGSNKGAIIGLMVGGVVNA

SEQ ID NO: 170 - protein, 42 aa, Artificial Sequence
  Synthetic Construct
DAEFRHDSGYEVHHQKLVFFAEDVGSNKGAIIGLMVGGVVQA

SEQ ID NO: 171 - protein, 42 aa, Artificial Sequence
  Synthetic Construct
DAEFRHDSGYEVHHQKLVFFAEDVGSNKGAIIGLMVGGVVCA

SEQ ID NO: 172 - protein, 42 aa, Artificial Sequence
  Synthetic Construct
DAEFRHDSGYEVHHQKLVFFAEDVGSNKGAIIGLMVGGVVIP

SEQ ID NO: 173 - protein, 42 aa, Artificial Sequence
  Synthetic Construct
DAEFRHDSGYEVHHQKLVFFAEDVGSNKGAIIGLMVGGVVIG

SEQ ID NO: 174 - protein, 42 aa, Artificial Sequence
  Synthetic Construct
DAEFRHDSGYEVHHQKLVFFAEDVGSNKGAIIGLMVGGVVIK

SEQ ID NO: 175 - protein, 42 aa, Artificial Sequence
  Synthetic Construct
DAEFRHDSGYEVHHQKLVFFAEDVGSNKGAIIGLMVGGVVIR

SEQ ID NO: 176 - protein, 42 aa, Artificial Sequence
  Synthetic Construct
DAEFRHDSGYEVHHQKLVFFAEDVGSNKGAIIGLMVGGVVIH

SEQ ID NO: 177 - protein, 42 aa, Artificial Sequence
  Synthetic Construct
DAEFRHDSGYEVHHQKLVFFAEDVGSNKGAIIGLMVGGVVIE

SEQ ID NO: 178 - protein, 42 aa, Artificial Sequence
  Synthetic Construct
DAEFRHDSGYEVHHQKLVFFAEDVGSNKGAIIGLMVGGVVID

SEQ ID NO: 179 - protein, 42 aa, Artificial Sequence
  Synthetic Construct
DAEFRHDSGYEVHHQKLVFFAEDVGSNKGAIIGLMVGGVVIS

SEQ ID NO: 180 - protein, 42 aa, Artificial Sequence
  Synthetic Construct
DAEFRHDSGYEVHHQKLVFFAEDVGSNKGAIIGLMVGGVVIT

SEQ ID NO: 181 - protein, 42 aa, Artificial Sequence
  Synthetic Construct
DAEFRHDSGYEVHHQKLVFFAEDVGSNKGAIIGLMVGGVVIN

SEQ ID NO: 182 - protein, 42 aa, Artificial Sequence
  Synthetic Construct
DAEFRHDSGYEVHHQKLVFFAEDVGSNKGAIIGLMVGGVVIQ

SEQ ID NO: 183 - protein, 42 aa, Artificial Sequence
  Synthetic Construct
DAEFRHDSGYEVHHQKLVFFAEDVGSNKGAIIGLMVGGVVIC

SEQ ID NO: 184 - protein, 42 aa, Artificial Sequence
  Synthetic Construct
DAEFRHDSGYEVHHQKLVFFAEDVGSNKGAIIGLPPGGVVIA

SEQ ID NO: 185 - protein, 42 aa, Artificial Sequence
  Synthetic Construct
DAEFRHDSGYEVHHQKLVFFAEDVGSNKGAIIGLPPGPVVIA

SEQ ID NO: 186 - protein, 42 aa, Artificial Sequence
  Synthetic Construct
DAEFRHDSGYEVHHQKLVFFAEDVGSNKGAIIPLPPGGVVIA

SEQ ID NO: 187 - protein, 42 aa, Artificial Sequence
  Synthetic Construct
  MISC_FEATURE (36)..(36): octenyl alanine
DAEFRHDSGYEVHHQKLVFFAEDVGSNKGAIIGLPXGGVVIA

SEQ ID NO: 188 - protein, 42 aa, Artificial Sequence
  Synthetic Construct
  MISC_FEATURE (35)..(35): D-proline
DAEFRHDSGYEVHHQKLVFFAEDVGSNKGAIIGLXVGGVVIA

SEQ ID NO: 189 - protein, 42 aa, Artificial Sequence; identical to SEQ ID NO: 188
  Synthetic Construct
  MISC_FEATURE (35)..(35): pyroglutamic acid

SEQ ID NO: 190 - protein, 42 aa, Artificial Sequence; identical to SEQ ID NO: 188
  Synthetic Construct
  MISC_FEATURE (35)..(35): N-methyl methionine

SEQ ID NO: 191 - protein, 42 aa, Artificial Sequence; identical to SEQ ID NO: 188
  Synthetic Construct
  MISC_FEATURE (35)..(35): carboxyglutamic acid

SEQ ID NO: 192 - protein, 42 aa, Artificial Sequence; identical to SEQ ID NO: 188
  Synthetic Construct
  MISC_FEATURE (35)..(35): pyrrolysine

SEQ ID NO: 193 - protein, 42 aa, Artificial Sequence
  Synthetic Construct
  MISC_FEATURE (1)..(1): palmitoyl-aspartate
XAEFRHDSGYEVHHQKLVFFAEDVGSNKGAIIGLPVGGVVIA

SEQ ID NO: 194 - protein, 42 aa, Artificial Sequence
  Synthetic Construct
  misc_feature (29)..(29): Xaa can be any beta-sheet destabilizing modification
DAEFRHDSGYEVHHQKLVFFAEDVGSNKXAIIGLMVGGVVIA

SEQ ID NO: 195 - protein, 42 aa, Artificial Sequence
  Synthetic Construct
  misc_feature (30)..(30): Xaa can be any beta-sheet destabilizing modification
DAEFRHDSGYEVHHQKLVFFAEDVGSNKGXIIGLMVGGVVIA

SEQ ID NO: 196 - protein, 42 aa, Artificial Sequence
  Synthetic Construct
  misc_feature (31)..(31): Xaa can be any beta-sheet destabilizing modification
DAEFRHDSGYEVHHQKLVFFAEDVGSNKGAXIGLMVGGVVIA

SEQ ID NO: 197 - protein, 42 aa, Artificial Sequence
  Synthetic Construct
  misc_feature (32)..(32): Xaa can be any beta-sheet destabilizing modification
DAEFRHDSGYEVHHQKLVFFAEDVGSNKGAIXGLMVGGVVIA

SEQ ID NO: 198 - protein, 42 aa, Artificial Sequence
  Synthetic Construct
  misc_feature (33)..(33): Xaa can be any beta-sheet destabilizing modification
DAEFRHDSGYEVHHQKLVFFAEDVGSNKGAIIXLMVGGVVIA

SEQ ID NO: 199 - protein, 42 aa, Artificial Sequence
  Synthetic Construct
  misc_feature (34)..(34): Xaa can be any beta-sheet destabilizing modification
DAEFRHDSGYEVHHQKLVFFAEDVGSNKGAIIGXMVGGVVIA

SEQ ID NO: 200 - protein, 42 aa, Artificial Sequence; identical to SEQ ID NO: 188
  Synthetic Construct
  misc_feature (35)..(35): Xaa can be any beta-sheet destabilizing modification

SEQ ID NO: 201 - protein, 42 aa, Artificial Sequence
  Synthetic Construct
  misc_feature (36)..(36): Xaa can be any beta-sheet destabilizing modification
DAEFRHDSGYEVHHQKLVFFAEDVGSNKGAIIGLMXGGVVIA

SEQ ID NO: 202 - protein, 42 aa, Artificial Sequence
  Synthetic Construct
  misc_feature (37)..(37): Xaa can be any beta-sheet destabilizing modification
DAEFRHDSGYEVHHQKLVFFAEDVGSNKGAIIGLMVXGVVIA

SEQ ID NO: 203 - protein, 42 aa, Artificial Sequence
  Synthetic Construct
  misc_feature (38)..(38): Xaa can be any beta-sheet destabilizing modification
DAEFRHDSGYEVHHQKLVFFAEDVGSNKGAIIGLMVGXVVIA

SEQ ID NO: 204 - protein, 42 aa, Artificial Sequence
  Synthetic Construct
  misc_feature (39)..(39): Xaa can be any beta-sheet destabilizing modification
DAEFRHDSGYEVHHQKLVFFAEDVGSNKGAIIGLMVGGXVIA

SEQ ID NO: 205 - protein, 42 aa, Artificial Sequence
  Synthetic Construct
  misc_feature (40)..(40): Xaa can be any beta-sheet destabilizing modification
DAEFRHDSGYEVHHQKLVFFAEDVGSNKGAIIGLMVGGVXIA

SEQ ID NO: 206 - protein, 42 aa, Artificial Sequence
  Synthetic Construct
  misc_feature (41)..(41): Xaa can be any beta-sheet destabilizing modification
DAEFRHDSGYEVHHQKLVFFAEDVGSNKGAIIGLMVGGVVXA

SEQ ID NO: 207 - protein, 42 aa, Artificial Sequence
  Synthetic Construct
  misc_feature (42)..(42): Xaa can be any beta-sheet destabilizing modification
DAEFRHDSGYEVHHQKLVFFAEDVGSNKGAIIGLMVGGVVIX

SEQ ID NO: 208 - protein, 140 aa, Homo sapiens
MDVFMKGLSKAKEGVVAAAEKTKQGVAEAAGKTKEGVLYVGSKTKEGVVHGVATVAEKTKEQVTNVGGAVVTGVTAVAQKTVEGAGSIAAATGFVKKDQLGKNEEGAPQEGILEDMPVDPDNEAYEMPSEEGYQDYEPEA

SEQ ID NO: 209 - protein, 139 aa, Artificial Sequence
  Synthetic Construct
MDVFMKGLSKAKEGVVAAAEKTKQGVAEAAGKTKEGVLYVGSKTKEGVVHGVATVAEKTKEQVTNVGGAVVTGVTAVAQKTVEGAGSIAAATGFKKDQLGKNEEGAPQEGILEDMPVDPDNEAYEMPSEEGYQDYEPEA

SEQ ID NO: 210 - protein, 138 aa, Artificial Sequence
  Synthetic Construct
MDVFMKGLSKAKEGVVAAAEKTKQGVAEAAGKTKEGVLYVGSKTKEGVVHGVATVAEKTKEQVTNVGGAVVTGVTAVAQKTVEGAGSIAAATGKKDQLGKNEEGAPQEGILEDMPVDPDNEAYEMPSEEGYQDYEPEA

SEQ ID NO: 211 - protein, 137 aa, Artificial Sequence
  Synthetic Construct
MDVFMKGLSKAKEGVVAAAEKTKQGVAEAAGKTKEGVLYVGSKTKEGVVHGVATVAEKTKEQVTNVGGAVVTGVTAVAQKTVEGAGSIAAATKKDQLGKNEEGAPQEGILEDMPVDPDNEAYEMPSEEGYQDYEPEA

SEQ ID NO: 212 - protein, 136 aa, Artificial Sequence
  Synthetic Construct
MDVFMKGLSKAKEGVVAAAEKTKQGVAEAAGKTKEGVLYVGSKTKEGVVHGVATVAEKTKEQVTNVGGAVVTGVTAVAQKTVEGAGSIAAAKKDQLGKNEEGAPQEGILEDMPVDPDNEAYEMPSEEGYQDYEPEA

SEQ ID NO: 213 - protein, 135 aa, Artificial Sequence
  Synthetic Construct
MDVFMKGLSKAKEGVVAAAEKTKQGVAEAAGKTKEGVLYVGSKTKEGVVHGVATVAEKTKEQVTNVGGAVVTGVTAVAQKTVEGAGSIAAKKDQLGKNEEGAPQEGILEDMPVDPDNEAYEMPSEEGYQDYEPEA

SEQ ID NO: 214 - protein, 134 aa, Artificial Sequence
  Synthetic Construct
MDVFMKGLSKAKEGVVAAAEKTKQGVAEAAGKTKEGVLYVGSKTKEGVVHGVATVAEKTKEQVTNVGGAVVTGVTAVAQKTVEGAGSIAKKDQLGKNEEGAPQEGILEDMPVDPDNEAYEMPSEEGYQDYEPEA

SEQ ID NO: 215 - protein, 133 aa, Artificial Sequence
  Synthetic Construct
MDVFMKGLSKAKEGVVAAAEKTKQGVAEAAGKTKEGVLYVGSKTKEGVVHGVATVAEKTKEQVTNVGGAVVTGVTAVAQKTVEGAGSIKKDQLGKNEEGAPQEGILEDMPVDPDNEAYEMPSEEGYQDYEPEA

SEQ ID NO: 216 - protein, 132 aa, Artificial Sequence
  Synthetic Construct
MDVFMKGLSKAKEGVVAAAEKTKQGVAEAAGKTKEGVLYVGSKTKEGVVHGVATVAEKTKEQVTNVGGAVVTGVTAVAQKTVEGAGSKKDQLGKNEEGAPQEGILEDMPVDPDNEAYEMPSEEGYQDYEPEA

SEQ ID NO: 217 - protein, 131 aa, Artificial Sequence
  Synthetic Construct
MDVFMKGLSKAKEGVVAAAEKTKQGVAEAAGKTKEGVLYVGSKTKEGVVHGVATVAEKTKEQVTNVGGAVVTGVTAVAQKTVEGAGKKDQLGKNEEGAPQEGILEDMPVDPDNEAYEMPSEEGYQDYEPEA

SEQ ID NO: 218 - protein, 130 aa, Artificial Sequence
  Synthetic Construct
MDVFMKGLSKAKEGVVAAAEKTKQGVAEAAGKTKEGVLYVGSKTKEGVVHGVATVAEKTKEQVTNVGGAVVTGVTAVAQKTVEGAKKDQLGKNEEGAPQEGILEDMPVDPDNEAYEMPSEEGYQDYEPEA

SEQ ID NO: 219 - protein, 129 aa, Artificial Sequence
  Synthetic Construct
MDVFMKGLSKAKEGVVAAAEKTKQGVAEAAGKTKEGVLYVGSKTKEGVVHGVATVAEKTKEQVTNVGGAVVTGVTAVAQKTVEGKKDQLGKNEEGAPQEGILEDMPVDPDNEAYEMPSEEGYQDYEPEA

SEQ ID NO: 220 - protein, 128 aa, Artificial Sequence
  Synthetic Construct
MDVFMKGLSKAKEGVVAAAEKTKQGVAEAAGKTKEGVLYVGSKTKEGVVHGVATVAEKTKEQVTNVGGAVVTGVTAVAQKTVEKKDQLGKNEEGAPQEGILEDMPVDPDNEAYEMPSEEGYQDYEPEA

SEQ ID NO: 221 - protein, 127 aa, Artificial Sequence
  Synthetic Construct
MDVFMKGLSKAKEGVVAAAEKTKQGVAEAAGKTKEGVLYVGSKTKEGVVHGVATVAEKTKEQVTNVGGAVVTGVTAVAQKTVKKDQLGKNEEGAPQEGILEDMPVDPDNEAYEMPSEEGYQDYEPEA

SEQ ID NO: 222 - protein, 126 aa, Artificial Sequence
  Synthetic Construct
MDVFMKGLSKAKEGVVAAAEKTKQGVAEAAGKTKEGVLYVGSKTKEGVVHGVATVAEKTKEQVTNVGGAVVTGVTAVAQKTKKDQLGKNEEGAPQEGILEDMPVDPDNEAYEMPSEEGYQDYEPEA

SEQ ID NO: 223 - protein, 125 aa, Artificial Sequence
  Synthetic Construct
MDVFMKGLSKAKEGVVAAAEKTKQGVAEAAGKTKEGVLYVGSKTKEGVVHGVATVAEKTKEQVTNVGGAVVTGVTAVAQKKKDQLGKNEEGAPQEGILEDMPVDPDNEAYEMPSEEGYQDYEPEA

SEQ ID NO: 224 - protein, 124 aa, Artificial Sequence
  Synthetic Construct
MDVFMKGLSKAKEGVVAAAEKTKQGVAEAAGKTKEGVLYVGSKTKEGVVHGVATVAEKTKEQVTNVGGAVVTGVTAVAQKKDQLGKNEEGAPQEGILEDMPVDPDNEAYEMPSEEGYQDYEPEA

SEQ ID NO: 225 - protein, 123 aa, Artificial Sequence
  Synthetic Construct
MDVFMKGLSKAKEGVVAAAEKTKQGVAEAAGKTKEGVLYVGSKTKEGVVHGVATVAEKTKEQVTNVGGAVVTGVTAVAKKDQLGKNEEGAPQEGILEDMPVDPDNEAYEMPSEEGYQDYEPEA

SEQ ID NO: 226 - protein, 122 aa, Artificial Sequence
  Synthetic Construct
MDVFMKGLSKAKEGVVAAAEKTKQGVAEAAGKTKEGVLYVGSKTKEGVVHGVATVAEKTKEQVTNVGGAVVTGVTAVKKDQLGKNEEGAPQEGILEDMPVDPDNEAYEMPSEEGYQDYEPEA

SEQ ID NO: 227 - protein, 121 aa, Artificial Sequence
  Synthetic Construct
MDVFMKGLSKAKEGVVAAAEKTKQGVAEAAGKTKEGVLYVGSKTKEGVVHGVATVAEKTKEQVTNVGGAVVTGVTAKKDQLGKNEEGAPQEGILEDMPVDPDNEAYEMPSEEGYQDYEPEA

SEQ ID NO: 228 - protein, 120 aa, Artificial Sequence
  Synthetic Construct
MDVFMKGLSKAKEGVVAAAEKTKQGVAEAAGKTKEGVLYVGSKTKEGVVHGVATVAEKTKEQVTNVGGAVVTGVTKKDQLGKNEEGAPQEGILEDMPVDPDNEAYEMPSEEGYQDYEPEA

SEQ ID NO: 229 - protein, 119 aa, Artificial Sequence
  Synthetic Construct
MDVFMKGLSKAKEGVVAAAEKTKQGVAEAAGKTKEGVLYVGSKTKEGVVHGVATVAEKTKEQVTNVGGAVVTGVKKDQLGKNEEGAPQEGILEDMPVDPDNEAYEMPSEEGYQDYEPEA

SEQ ID NO: 230 - protein, 118 aa, Artificial Sequence
  Synthetic Construct
MDVFMKGLSKAKEGVVAAAEKTKQGVAEAAGKTKEGVLYVGSKTKEGVVHGVATVAEKTKEQVTNVGGAVVTGKKDQLGKNEEGAPQEGILEDMPVDPDNEAYEMPSEEGYQDYEPEA

SEQ ID NO: 231 - protein, 117 aa, Artificial Sequence
  Synthetic Construct
MDVFMKGLSKAKEGVVAAAEKTKQGVAEAAGKTKEGVLYVGSKTKEGVVHGVATVAEKTKEQVTNVGGAVVTKKDQLGKNEEGAPQEGILEDMPVDPDNEAYEMPSEEGYQDYEPEA

SEQ ID NO: 232 - protein, 116 aa, Artificial Sequence
  Synthetic Construct
MDVFMKGLSKAKEGVVAAAEKTKQGVAEAAGKTKEGVLYVGSKTKEGVVHGVATVAEKTKEQVTNVGGAVVKKDQLGKNEEGAPQEGILEDMPVDPDNEAYEMPSEEGYQDYEPEA

SEQ ID NO: 233 - protein, 115 aa, Artificial Sequence
  Synthetic Construct
MDVFMKGLSKAKEGVVAAAEKTKQGVAEAAGKTKEGVLYVGSKTKEGVVHGVATVAEKTKEQVTNVGGAVKKDQLGKNEEGAPQEGILEDMPVDPDNEAYEMPSEEGYQDYEPEA

SEQ ID NO: 234 - protein, 114 aa, Artificial Sequence
  Synthetic Construct
MDVFMKGLSKAKEGVVAAAEKTKQGVAEAAGKTKEGVLYVGSKTKEGVVHGVATVAEKTKEQVTNVGGAKKDQLGKNEEGAPQEGILEDMPVDPDNEAYEMPSEEGYQDYEPEA

SEQ ID NO: 235 - protein, 113 aa, Artificial Sequence
  Synthetic Construct
MDVFMKGLSKAKEGVVAAAEKTKQGVAEAAGKTKEGVLYVGSKTKEGVVHGVATVAEKTKEQVTNVGGKKDQLGKNEEGAPQEGILEDMPVDPDNEAYEMPSEEGYQDYEPEA

SEQ ID NO: 236 - protein, 112 aa, Artificial Sequence
  Synthetic Construct
MDVFMKGLSKAKEGVVAAAEKTKQGVAEAAGKTKEGVLYVGSKTKEGVVHGVATVAEKTKEQVTNVGKKDQLGKNEEGAPQEGILEDMPVDPDNEAYEMPSEEGYQDYEPEA

SEQ ID NO: 237 - protein, 111 aa, Artificial Sequence
  Synthetic Construct
MDVFMKGLSKAKEGVVAAAEKTKQGVAEAAGKTKEGVLYVGSKTKEGVVHGVATVAEKTKEQVTNVKKDQLGKNEEGAPQEGILEDMPVDPDNEAYEMPSEEGYQDYEPEA

SEQ ID NO: 238 - protein, 110 aa, Artificial Sequence
  Synthetic Construct
MDVFMKGLSKAKEGVVAAAEKTKQGVAEAAGKTKEGVLYVGSKTKEGVVHGVATVAEKTKEQVTNKKDQLGKNEEGAPQEGILEDMPVDPDNEAYEMPSEEGYQDYEPEA

SEQ ID NO: 239 - protein, 109 aa, Artificial Sequence
  Synthetic Construct
MDVFMKGLSKAKEGVVAAAEKTKQGVAEAAGKTKEGVLYVGSKTKEGVVHGVATVAEKTKEQVTKKDQLGKNEEGAPQEGILEDMPVDPDNEAYEMPSEEGYQDYEPEA

SEQ ID NO: 240 - protein, 108 aa, Artificial Sequence
  Synthetic Construct
MDVFMKGLSKAKEGVVAAAEKTKQGVAEAAGKTKEGVLYVGSKTKEGVVHGVATVAEKTKEQVKKDQLGKNEEGAPQEGILEDMPVDPDNEAYEMPSEEGYQDYEPEA

SEQ ID NO: 241 - protein, 107 aa, Artificial Sequence
  Synthetic Construct
MDVFMKGLSKAKEGVVAAAEKTKQGVAEAAGKTKEGVLYVGSKTKEGVVHGVATVAEKTKEQKKDQLGKNEEGAPQEGILEDMPVDPDNEAYEMPSEEGYQDYEPEA

SEQ ID NO: 242 - protein, 106 aa, Artificial Sequence
  Synthetic Construct
MDVFMKGLSKAKEGVVAAAEKTKQGVAEAAGKTKEGVLYVGSKTKEGVVHGVATVAEKTKEKKDQLGKNEEGAPQEGILEDMPVDPDNEAYEMPSEEGYQDYEPEA

SEQ ID NO: 243 - protein, 105 aa, Artificial Sequence
  Synthetic Construct
MDVFMKGLSKAKEGVVAAAEKTKQGVAEAAGKTKEGVLYVGSKTKEGVVHGVATVAEKTKKKDQLGKNEEGAPQEGILEDMPVDPDNEAYEMPSEEGYQDYEPEA

SEQ ID NO: 244 - protein, 140 aa, Artificial Sequence
  Synthetic Construct
MDVFMKGLSKAKEGVVAAAEKTKQGVAEAAGKTKEGVLYVGSKTKEGVVHGVATVAEKTKPQVTNVGGAVVTGVTAVAQKTVEGAGSIAAATGFVKKDQLGKNEEGAPQEGILEDMPVDPDNEAYEMPSEEGYQDYEPEA

SEQ ID NO: 245 - protein, 140 aa, Artificial Sequence
  Synthetic Construct
MDVFMKGLSKAKEGVVAAAEKTKQGVAEAAGKTKEGVLYVGSKTKEGVVHGVATVAEKTKGQVTNVGGAVVTGVTAVAQKTVEGAGSIAAATGFVKKDQLGKNEEGAPQEGILEDMPVDPDNEAYEMPSEEGYQDYEPEA

SEQ ID NO: 246 - protein, 140 aa, Artificial Sequence
  Synthetic Construct
MDVFMKGLSKAKEGVVAAAEKTKQGVAEAAGKTKEGVLYVGSKTKEGVVHGVATVAEKTKKQVTNVGGAVVTGVTAVAQKTVEGAGSIAAATGFVKKDQLGKNEEGAPQEGILEDMPVDPDNEAYEMPSEEGYQDYEPEA

SEQ ID NO: 247 - protein, 140 aa, Artificial Sequence
  Synthetic Construct
MDVFMKGLSKAKEGVVAAAEKTKQGVAEAAGKTKEGVLYVGSKTKEGVVHGVATVAEKTKRQVTNVGGAVVTGVTAVAQKTVEGAGSIAAATGFVKKDQLGKNEEGAPQEGILEDMPVDPDNEAYEMPSEEGYQDYEPEA

SEQ ID NO: 248 - protein, 140 aa, Artificial Sequence
  Synthetic Construct
MDVFMKGLSKAKEGVVAAAEKTKQGVAEAAGKTKEGVLYVGSKTKEGVVHGVATVAEKTKHQVTNVGGAVVTGVTAVAQKTVEGAGSIAAATGFVKKDQLGKNEEGAPQEGILEDMPVDPDNEAYEMPSEEGYQDYEPEA

SEQ ID NO: 249 - protein, 140 aa, Artificial Sequence; identical to SEQ ID NO: 208
  Synthetic Construct

SEQ ID NO: 250 - protein, 140 aa, Artificial Sequence
  Synthetic Construct
MDVFMKGLSKAKEGVVAAAEKTKQGVAEAAGKTKEGVLYVGSKTKEGVVHGVATVAEKTKDQVTNVGGAVVTGVTAVAQKTVEGAGSIAAATGFVKKDQLGKNEEGAPQEGILEDMPVDPDNEAYEMPSEEGYQDYEPEA

SEQ ID NO: 251 - protein, 140 aa, Artificial Sequence
  Synthetic Construct
MDVFMKGLSKAKEGVVAAAEKTKQGVAEAAGKTKEGVLYVGSKTKEGVVHGVATVAEKTKSQVTNVGGAVVTGVTAVAQKTVEGAGSIAAATGFVKKDQLGKNEEGAPQEGILEDMPVDPDNEAYEMPSEEGYQDYEPEA

SEQ ID NO: 252 - protein, 140 aa, Artificial Sequence
  Synthetic Construct
MDVFMKGLSKAKEGVVAAAEKTKQGVAEAAGKTKEGVLYVGSKTKEGVVHGVATVAEKTKTQVTNVGGAVVTGVTAVAQKTVEGAGSIAAATGFVKKDQLGKNEEGAPQEGILEDMPVDPDNEAYEMPSEEGYQDYEPEA

SEQ ID NO: 253 - protein, 140 aa, Artificial Sequence
  Synthetic Construct
MDVFMKGLSKAKEGVVAAAEKTKQGVAEAAGKTKEGVLYVGSKTKEGVVHGVATVAEKTKNQVTNVGGAVVTGVTAVAQKTVEGAGSIAAATGFVKKDQLGKNEEGAPQEGILEDMPVDPDNEAYEMPSEEGYQDYEPEA

SEQ ID NO: 254 - protein, 140 aa, Artificial Sequence
  Synthetic Construct
MDVFMKGLSKAKEGVVAAAEKTKQGVAEAAGKTKEGVLYVGSKTKEGVVHGVATVAEKTKQQVTNVGGAVVTGVTAVAQKTVEGAGSIAAATGFVKKDQLGKNEEGAPQEGILEDMPVDPDNEAYEMPSEEGYQDYEPEA

SEQ ID NO: 255 - protein, 140 aa, Artificial Sequence
  Synthetic Construct
MDVFMKGLSKAKEGVVAAAEKTKQGVAEAAGKTKEGVLYVGSKTKEGVVHGVATVAEKTKCQVTNVGGAVVTGVTAVAQKTVEGAGSIAAATGFVKKDQLGKNEEGAPQEGILEDMPVDPDNEAYEMPSEEGYQDYEPEA

SEQ ID NO: 256 - protein, 140 aa, Artificial Sequence
  Synthetic Construct
MDVFMKGLSKAKEGVVAAAEKTKQGVAEAAGKTKEGVLYVGSKTKEGVVHGVATVAEKTKEPVTNVGGAVVTGVTAVAQKTVEGAGSIAAATGFVKKDQLGKNEEGAPQEGILEDMPVDPDNEAYEMPSEEGYQDYEPEA

SEQ ID NO: 257 - protein, 140 aa, Artificial Sequence
  Synthetic Construct
MDVFMKGLSKAKEGVVAAAEKTKQGVAEAAGKTKEGVLYVGSKTKEGVVHGVATVAEKTKEGVTNVGGAVVTGVTAVAQKTVEGAGSIAAATGFVKKDQLGKNEEGAPQEGILEDMPVDPDNEAYEMPSEEGYQDYEPEA

SEQ ID NO: 258 - protein, 140 aa, Artificial Sequence
  Synthetic Construct
MDVFMKGLSKAKEGVVAAAEKTKQGVAEAAGKTKEGVLYVGSKTKEGVVHGVATVAEKTKEKVTNVGGAVVTGVTAVAQKTVEGAGSIAAATGFVKKDQLGKNEEGAPQEGILEDMPVDPDNEAYEMPSEEGYQDYEPEA

SEQ ID NO: 259 - protein, 140 aa, Artificial Sequence
  Synthetic Construct
MDVFMKGLSKAKEGVVAAAEKTKQGVAEAAGKTKEGVLYVGSKTKEGVVHGVATVAEKTKERVTNVGGAVVTGVTAVAQKTVEGAGSIAAATGFVKKDQLGKNEEGAPQEGILEDMPVDPDNEAYEMPSEEGYQDYEPEA

SEQ ID NO: 260 - protein, 140 aa, Artificial Sequence
  Synthetic Construct
MDVFMKGLSKAKEGVVAAAEKTKQGVAEAAGKTKEGVLYVGSKTKEGVVHGVATVAEKTKEHVTNVGGAVVTGVTAVAQKTVEGAGSIAAATGFVKKDQLGKNEEGAPQEGILEDMPVDPDNEAYEMPSEEGYQDYEPEA

SEQ ID NO: 261 - protein, 140 aa, Artificial Sequence
  Synthetic Construct
MDVFMKGLSKAKEGVVAAAEKTKQGVAEAAGKTKEGVLYVGSKTKEGVVHGVATVAEKTKEEVTNVGGAVVTGVTAVAQKTVEGAGSIAAATGFVKKDQLGKNEEGAPQEGILEDMPVDPDNEAYEMPSEEGYQDYEPEA

SEQ ID NO: 262 - protein, 140 aa, Artificial Sequence
  Synthetic Construct
MDVFMKGLSKAKEGVVAAAEKTKQGVAEAAGKTKEGVLYVGSKTKEGVVHGVATVAEKTKEDVTNVGGAVVTGVTAVAQKTVEGAGSIAAATGFVKKDQLGKNEEGAPQEGILEDMPVDPDNEAYEMPSEEGYQDYEPEA

SEQ ID NO: 263 - protein, 140 aa, Artificial Sequence
  Synthetic Construct
MDVFMKGLSKAKEGVVAAAEKTKQGVAEAAGKTKEGVLYVGSKTKEGVVHGVATVAEKTKESVTNVGGAVVTGVTAVAQKTVEGAGSIAAATGFVKKDQLGKNEEGAPQEGILEDMPVDPDNEAYEMPSEEGYQDYEPEA

SEQ ID NO: 264 - protein, 140 aa, Artificial Sequence
  Synthetic Construct
MDVFMKGLSKAKEGVVAAAEKTKQGVAEAAGKTKEGVLYVGSKTKEGVVHGVATVAEKTKETVTNVGGAVVTGVTAVAQKTVEGAGSIAAATGFVKKDQLGKNEEGAPQEGILEDMPVDPDNEAYEMPSEEGYQDYEPEA

SEQ ID NO: 265 - protein, 140 aa, Artificial Sequence
  Synthetic Construct
MDVFMKGLSKAKEGVVAAAEKTKQGVAEAAGKTKEGVLYVGSKTKEGVVHGVATVAEKTKENVTNVGGAVVTGVTAVAQKTVEGAGSIAAATGFVKKDQLGKNEEGAPQEGILEDMPVDPDNEAYEMPSEEGYQDYEPEA

SEQ ID NO: 266 - protein, 140 aa, Artificial Sequence; identical to SEQ ID NO: 208
  Synthetic Construct

SEQ ID NO: 267 - protein, 140 aa, Artificial Sequence
  Synthetic Construct
MDVFMKGLSKAKEGVVAAAEKTKQGVAEAAGKTKEGVLYVGSKTKEGVVHGVATVAEKTKECVTNVGGAVVTGVTAVAQKTVEGAGSIAAATGFVKKDQLGKNEEGAPQEGILEDMPVDPDNEAYEMPSEEGYQDYEPEA

SEQ ID NO: 268 - protein, 140 aa, Artificial Sequence
  Synthetic Construct
MDVFMKGLSKAKEGVVAAAEKTKQGVAEAAGKTKEGVLYVGSKTKEGVVHGVATVAEKTKEQPTNVGGAVVTGVTAVAQKTVEGAGSIAAATGFVKKDQLGKNEEGAPQEGILEDMPVDPDNEAYEMPSEEGYQDYEPEA

SEQ ID NO: 269 - protein, 140 aa, Artificial Sequence
  Synthetic Construct
MDVFMKGLSKAKEGVVAAAEKTKQGVAEAAGKTKEGVLYVGSKTKEGVVHGVATVAEKTKEQGTNVGGAVVTGVTAVAQKTVEGAGSIAAATGFVKKDQLGKNEEGAPQEGILEDMPVDPDNEAYEMPSEEGYQDYEPEA

SEQ ID NO: 270 - protein, 140 aa, Artificial Sequence
  Synthetic Construct
MDVFMKGLSKAKEGVVAAAEKTKQGVAEAAGKTKEGVLYVGSKTKEGVVHGVATVAEKTKEQKTNVGGAVVTGVTAVAQKTVEGAGSIAAATGFVKKDQLGKNEEGAPQEGILEDMPVDPDNEAYEMPSEEGYQDYEPEA

SEQ ID NO: 271 - protein, 140 aa, Artificial Sequence
  Synthetic Construct
MDVFMKGLSKAKEGVVAAAEKTKQGVAEAAGKTKEGVLYVGSKTKEGVVHGVATVAEKTKEQRTNVGGAVVTGVTAVAQKTVEGAGSIAAATGFVKKDQLGKNEEGAPQEGILEDMPVDPDNEAYEMPSEEGYQDYEPEA

SEQ ID NO: 272 - protein, 140 aa, Artificial Sequence
  Synthetic Construct
MDVFMKGLSKAKEGVVAAAEKTKQGVAEAAGKTKEGVLYVGSKTKEGVVHGVATVAEKTKEQHTNVGGAVVTGVTAVAQKTVEGAGSIAAATGFVKKDQLGKNEEGAPQEGILEDMPVDPDNEAYEMPSEEGYQDYEPEA

SEQ ID NO: 273 - protein, 140 aa, Artificial Sequence
  Synthetic Construct
MDVFMKGLSKAKEGVVAAAEKTKQGVAEAAGKTKEGVLYVGSKTKEGVVHGVATVAEKTKEQETNVGGAVVTGVTAVAQKTVEGAGSIAAATGFVKKDQLGKNEEGAPQEGILEDMPVDPDNEAYEMPSEEGYQDYEPEA

SEQ ID NO: 274 - protein, 140 aa, Artificial Sequence
  Synthetic Construct
MDVFMKGLSKAKEGVVAAAEKTKQGVAEAAGKTKEGVLYVGSKTKEGVVHGVATVAEKTKEQDTNVGGAVVTGVTAVAQKTVEGAGSIAAATGFVKKDQLGKNEEGAPQEGILEDMPVDPDNEAYEMPSEEGYQDYEPEA

SEQ ID NO: 275 - protein, 140 aa, Artificial Sequence
  Synthetic Construct
MDVFMKGLSKAKEGVVAAAEKTKQGVAEAAGKTKEGVLYVGSKTKEGVVHGVATVAEKTKEQSTNVGGAVVTGVTAVAQKTVEGAGSIAAATGFVKKDQLGKNEEGAPQEGILEDMPVDPDNEAYEMPSEEGYQDYEPEA

SEQ ID NO: 276 - protein, 140 aa, Artificial Sequence
  Synthetic Construct
MDVFMKGLSKAKEGVVAAAEKTKQGVAEAAGKTKEGVLYVGSKTKEGVVHGVATVAEKTKEQTTNVGGAVVTGVTAVAQKTVEGAGSIAAATGFVKKDQLGKNEEGAPQEGILEDMPVDPDNEAYEMPSEEGYQDYEPEA

SEQ ID NO: 277 - protein, 140 aa, Artificial Sequence
  Synthetic Construct
MDVFMKGLSKAKEGVVAAAEKTKQGVAEAAGKTKEGVLYVGSKTKEGVVHGVATVAEKTKEQNTNVGGAVVTGVTAVAQKTVEGAGSIAAATGFVKKDQLGKNEEGAPQEGILEDMPVDPDNEAYEMPSEEGYQDYEPEA

SEQ ID NO: 278 - protein, 140 aa, Artificial Sequence
  Synthetic Construct
MDVFMKGLSKAKEGVVAAAEKTKQGVAEAAGKTKEGVLYVGSKTKEGVVHGVATVAEKTKEQQTNVGGAVVTGVTAVAQKTVEGAGSIAAATGFVKKDQLGKNEEGAPQEGILEDMPVDPDNEAYEMPSEEGYQDYEPEA

SEQ ID NO: 279 - protein, 140 aa, Artificial Sequence
  Synthetic Construct
MDVFMKGLSKAKEGVVAAAEKTKQGVAEAAGKTKEGVLYVGSKTKEGVVHGVATVAEKTKEQCTNVGGAVVTGVTAVAQKTVEGAGSIAAATGFVKKDQLGKNEEGAPQEGILEDMPVDPDNEAYEMPSEEGYQDYEPEA

SEQ ID NO: 280 - protein, 140 aa, Artificial Sequence
  Synthetic Construct
MDVFMKGLSKAKEGVVAAAEKTKQGVAEAAGKTKEGVLYVGSKTKEGVVHGVATVAEKTKEQVPNVGGAVVTGVTAVAQKTVEGAGSIAAATGFVKKDQLGKNEEGAPQEGILEDMPVDPDNEAYEMPSEEGYQDYEPEA

SEQ ID NO: 281 - protein, 140 aa, Artificial Sequence
  Synthetic Construct
MDVFMKGLSKAKEGVVAAAEKTKQGVAEAAGKTKEGVLYVGSKTKEGVVHGVATVAEKTKEQVGNVGGAVVTGVTAVAQKTVEGAGSIAAATGFVKKDQLGKNEEGAPQEGILEDMPVDPDNEAYEMPSEEGYQDYEPEA

SEQ ID NO: 282 - protein, 140 aa, Artificial Sequence
  Synthetic Construct
MDVFMKGLSKAKEGVVAAAEKTKQGVAEAAGKTKEGVLYVGSKTKEGVVHGVATVAEKTKEQVKNVGGAVVTGVTAVAQKTVEGAGSIAAATGFVKKDQLGKNEEGAPQEGILEDMPVDPDNEAYEMPSEEGYQDYEPEA

SEQ ID NO: 283 - protein, 140 aa, Artificial Sequence
  Synthetic Construct
MDVFMKGLSKAKEGVVAAAEKTKQGVAEAAGKTKEGVLYVGSKTKEGVVHGVATVAEKTKEQVRNVGGAVVTGVTAVAQKTVEGAGSIAAATGFVKKDQLGKNEEGAPQEGILEDMPVDPDNEAYEMPSEEGYQDYEPEA

SEQ ID NO: 284 - protein, 140 aa, Artificial Sequence
  Synthetic Construct
MDVFMKGLSKAKEGVVAAAEKTKQGVAEAAGKTKEGVLYVGSKTKEGVVHGVATVAEKTKEQVHNVGGAVVTGVTAVAQKTVEGAGSIAAATGFVKKDQLGKNEEGAPQEGILEDMPVDPDNEAYEMPSEEGYQDYEPEA

SEQ ID NO: 285 - protein, 140 aa, Artificial Sequence
  Synthetic Construct
MDVFMKGLSKAKEGVVAAAEKTKQGVAEAAGKTKEGVLYVGSKTKEGVVHGVATVAEKTKEQVENVGGAVVTGVTAVAQKTVEGAGSIAAATGFVKKDQLGKNEEGAPQEGILEDMPVDPDNEAYEMPSEEGYQDYEPEA

SEQ ID NO: 286 - protein, 140 aa, Artificial Sequence
  Synthetic Construct
MDVFMKGLSKAKEGVVAAAEKTKQGVAEAAGKTKEGVLYVGSKTKEGVVHGVATVAEKTKEQVDNVGGAVVTGVTAVAQKTVEGAGSIAAATGFVKKDQLGKNEEGAPQEGILEDMPVDPDNEAYEMPSEEGYQDYEPEA

SEQ ID NO: 287 - protein, 140 aa, Artificial Sequence
  Synthetic Construct
MDVFMKGLSKAKEGVVAAAEKTKQGVAEAAGKTKEGVLYVGSKTKEGVVHGVATVAEKTKEQVSNVGGAVVTGVTAVAQKTVEGAGSIAAATGFVKKDQLGKNEEGAPQEGILEDMPVDPDNEAYEMPSEEGYQDYEPEA

SEQ ID NO: 288 - protein, 140 aa, Artificial Sequence; identical to SEQ ID NO: 208
  Synthetic Construct

SEQ ID NO: 289 - protein, 140 aa, Artificial Sequence
  Synthetic Construct
MDVFMKGLSKAKEGVVAAAEKTKQGVAEAAGKTKEGVLYVGSKTKEGVVHGVATVAEKTKEQVNNVGGAVVTGVTAVAQKTVEGAGSIAAATGFVKKDQLGKNEEGAPQEGILEDMPVDPDNEAYEMPSEEGYQDYEPEA

SEQ ID NO: 290 - protein, 140 aa, Artificial Sequence
  Synthetic Construct
MDVFMKGLSKAKEGVVAAAEKTKQGVAEAAGKTKEGVLYVGSKTKEGVVHGVATVAEKTKEQVQNVGGAVVTGVTAVAQKTVEGAGSIAAATGFVKKDQLGKNEEGAPQEGILEDMPVDPDNEAYEMPSEEGYQDYEPEA

SEQ ID NO: 291 - protein, 140 aa, Artificial Sequence
  Synthetic Construct
MDVFMKGLSKAKEGVVAAAEKTKQGVAEAAGKTKEGVLYVGSKTKEGVVHGVATVAEKTKEQVCNVGGAVVTGVTAVAQKTVEGAGSIAAATGFVKKDQLGKNEEGAPQEGILEDMPVDPDNEAYEMPSEEGYQDYEPEA

SEQ ID NO: 292 - protein, 140 aa, Artificial Sequence
  Synthetic Construct
MDVFMKGLSKAKEGVVAAAEKTKQGVAEAAGKTKEGVLYVGSKTKEGVVHGVATVAEKTKEQVTPVGGAVVTGVTAVAQKTVEGAGSIAAATGFVKKDQLGKNEEGAPQEGILEDMPVDPDNEAYEMPSEEGYQDYEPEA

SEQ ID NO: 293 - protein, 140 aa, Artificial Sequence
  Synthetic Construct
MDVFMKGLSKAKEGVVAAAEKTKQGVAEAAGKTKEGVLYVGSKTKEGVVHGVATVAEKTKEQVTGVGGAVVTGVTAVAQKTVEGAGSIAAATGFVKKDQLGKNEEGAPQEGILEDMPVDPDNEAYEMPSEEGYQDYEPEA

SEQ ID NO: 294 - protein, 140 aa, Artificial Sequence
  Synthetic Construct
MDVFMKGLSKAKEGVVAAAEKTKQGVAEAAGKTKEGVLYVGSKTKEGVVHGVATVAEKTKEQVTKVGGAVVTGVTAVAQKTVEGAGSIAAATGFVKKDQLGKNEEGAPQEGILEDMPVDPDNEAYEMPSEEGYQDYEPEA

SEQ ID NO: 295 - protein, 140 aa, Artificial Sequence
  Synthetic Construct
MDVFMKGLSKAKEGVVAAAEKTKQGVAEAAGKTKEGVLYVGSKTKEGVVHGVATVAEKTKEQVTRVGGAVVTGVTAVAQKTVEGAGSIAAATGFVKKDQLGKNEEGAPQEGILEDMPVDPDNEAYEMPSEEGYQDYEPEA

SEQ ID NO: 296 - protein, 140 aa, Artificial Sequence
  Synthetic Construct
MDVFMKGLSKAKEGVVAAAEKTKQGVAEAAGKTKEGVLYVGSKTKEGVVHGVATVAEKTKEQVTHVGGAVVTGVTAVAQKTVEGAGSIAAATGFVKKDQLGKNEEGAPQEGILEDMPVDPDNEAYEMPSEEGYQDYEPEA

SEQ ID NO: 297 - protein, 140 aa, Artificial Sequence
  Synthetic Construct
MDVFMKGLSKAKEGVVAAAEKTKQGVAEAAGKTKEGVLYVGSKTKEGVVHGVATVAEKTKEQVTEVGGAVVTGVTAVAQKTVEGAGSIAAATGFVKKDQLGKNEEGAPQEGILEDMPVDPDNEAYEMPSEEGYQDYEPEA

SEQ ID NO: 298 - protein, 140 aa, Artificial Sequence
  Synthetic Construct
MDVFMKGLSKAKEGVVAAAEKTKQGVAEAAGKTKEGVLYVGSKTKEGVVHGVATVAEKTKEQVTDVGGAVVTGVTAVAQKTVEGAGSIAAATGFVKKDQLGKNEEGAPQEGILEDMPVDPDNEAYEMPSEEGYQDYEPEA

SEQ ID NO: 299 - protein, 140 aa, Artificial Sequence
  Synthetic Construct
MDVFMKGLSKAKEGVVAAAEKTKQGVAEAAGKTKEGVLYVGSKTKEGVVHGVATVAEKTKEQVTSVGGAVVTGVTAVAQKTVEGAGSIAAATGFVKKDQLGKNEEGAPQEGILEDMPVDPDNEAYEMPSEEGYQDYEPEA

SEQ ID NO: 300 - protein, 140 aa, Artificial Sequence
  Synthetic Construct
MDVFMKGLSKAKEGVVAAAEKTKQGVAEAAGKTKEGVLYVGSKTKEGVVHGVATVAEKTKEQVTTVGGAVVTGVTAVAQKTVEGAGSIAAATGFVKKDQLGKNEEGAPQEGILEDMPVDPDNEAYEMPSEEGYQDYEPEA

SEQ ID NO: 301 - protein, 140 aa, Artificial Sequence; identical to SEQ ID NO: 208
  Synthetic Construct

SEQ ID NO: 302 - protein, 140 aa, Artificial Sequence
  Synthetic Construct
MDVFMKGLSKAKEGVVAAAEKTKQGVAEAAGKTKEGVLYVGSKTKEGVVHGVATVAEKTKEQVTQVGGAVVTGVTAVAQKTVEGAGSIAAATGFVKKDQLGKNEEGAPQEGILEDMPVDPDNEAYEMPSEEGYQDYEPEA

SEQ ID NO: 303 - protein, 140 aa, Artificial Sequence
  Synthetic Construct
MDVFMKGLSKAKEGVVAAAEKTKQGVAEAAGKTKEGVLYVGSKTKEGVVHGVATVAEKTKEQVTCVGGAVVTGVTAVAQKTVEGAGSIAAATGFVKKDQLGKNEEGAPQEGILEDMPVDPDNEAYEMPSEEGYQDYEPEA

SEQ ID NO: 304 - protein, 140 aa, Artificial Sequence
  Synthetic Construct
MDVFMKGLSKAKEGVVAAAEKTKQGVAEAAGKTKEGVLYVGSKTKEGVVHGVATVAEKTKEQVTNPGGAVVTGVTAVAQKTVEGAGSIAAATGFVKKDQLGKNEEGAPQEGILEDMPVDPDNEAYEMPSEEGYQDYEPEA

SEQ ID NO: 305 - protein, 140 aa, Artificial Sequence
  Synthetic Construct
MDVFMKGLSKAKEGVVAAAEKTKQGVAEAAGKTKEGVLYVGSKTKEGVVHGVATVAEKTKEQVTNGGGAVVTGVTAVAQKTVEGAGSIAAATGFVKKDQLGKNEEGAPQEGILEDMPVDPDNEAYEMPSEEGYQDYEPEA

SEQ ID NO: 306 - protein, 140 aa, Artificial Sequence
  Synthetic Construct
MDVFMKGLSKAKEGVVAAAEKTKQGVAEAAGKTKEGVLYVGSKTKEGVVHGVATVAEKTKEQVTNKGGAVVTGVTAVAQKTVEGAGSIAAATGFVKKDQLGKNEEGAPQEGILEDMPVDPDNEAYEMPSEEGYQDYEPEA

SEQ ID NO: 307 - protein, 140 aa, Artificial Sequence
  Synthetic Construct
MDVFMKGLSKAKEGVVAAAEKTKQGVAEAAGKTKEGVLYVGSKTKEGVVHGVATVAEKTKEQVTNRGGAVVTGVTAVAQKTVEGAGSIAAATGFVKKDQLGKNEEGAPQEGILEDMPVDPDNEAYEMPSEEGYQDYEPEA

SEQ ID NO: 308 - protein, 140 aa, Artificial Sequence
  Synthetic Construct
MDVFMKGLSKAKEGVVAAAEKTKQGVAEAAGKTKEGVLYVGSKTKEGVVHGVATVAEKTKEQVTNHGGAVVTGVTAVAQKTVEGAGSIAAATGFVKKDQLGKNEEGAPQEGILEDMPVDPDNEAYEMPSEEGYQDYEPEA

SEQ ID NO: 309 - protein, 140 aa, Artificial Sequence
  Synthetic Construct
MDVFMKGLSKAKEGVVAAAEKTKQGVAEAAGKTKEGVLYVGSKTKEGVVHGVATVAEKTKEQVTNEGGAVVTGVTAVAQKTVEGAGSIAAATGFVKKDQLGKNEEGAPQEGILEDMPVDPDNEAYEMPSEEGYQDYEPEA

SEQ ID NO: 310 - protein, 140 aa, Artificial Sequence
  Synthetic Construct
MDVFMKGLSKAKEGVVAAAEKTKQGVAEAAGKTKEGVLYVGSKTKEGVVHGVATVAEKTKEQVTNDGGAVVTGVTAVAQKTVEGAGSIAAATGFVKKDQLGKNEEGAPQEGILEDMPVDPDNEAYEMPSEEGYQDYEPEA

SEQ ID NO: 311 - protein, 140 aa, Artificial Sequence
  Synthetic Construct
MDVFMKGLSKAKEGVVAAAEKTKQGVAEAAGKTKEGVLYVGSKTKEGVVHGVATVAEKTKEQVTNSGGAVVTGVTAVAQKTVEGAGSIAAATGFVKKDQLGKNEEGAPQEGILEDMPVDPDNEAYEMPSEEGYQDYEPEA

SEQ ID NO: 312 - protein, 140 aa, Artificial Sequence
  Synthetic Construct
MDVFMKGLSKAKEGVVAAAEKTKQGVAEAAGKTKEGVLYVGSKTKEGVVHGVATVAEKTKEQVTNTGGAVVTGVTAVAQKTVEGAGSIAAATGFVKKDQLGKNEEGAPQEGILEDMPVDPDNEAYEMPSEEGYQDYEPEA

SEQ ID NO: 313 - protein, 140 aa, Artificial Sequence
  Synthetic Construct
MDVFMKGLSKAKEGVVAAAEKTKQGVAEAAGKTKEGVLYVGSKTKEGVVHGVATVAEKTKEQVTNNGGAVVTGVTAVAQKTVEGAGSIAAATGFVKKDQLGKNEEGAPQEGILEDMPVDPDNEAYEMPSEEGYQDYEPEA

SEQ ID NO: 314 - protein, 140 aa, Artificial Sequence
  Synthetic Construct
MDVFMKGLSKAKEGVVAAAEKTKQGVAEAAGKTKEGVLYVGSKTKEGVVHGVATVAEKTKEQVTNQGGAVVTGVTAVAQKTVEGAGSIAAATGFVKKDQLGKNEEGAPQEGILEDMPVDPDNEAYEMPSEEGYQDYEPEA

SEQ ID NO: 315 - protein, 140 aa, Artificial Sequence
  Synthetic Construct
MDVFMKGLSKAKEGVVAAAEKTKQGVAEAAGKTKEGVLYVGSKTKEGVVHGVATVAEKTKEQVTNCGGAVVTGVTAVAQKTVEGAGSIAAATGFVKKDQLGKNEEGAPQEGILEDMPVDPDNEAYEMPSEEGYQDYEPEA

SEQ ID NO: 316 - protein, 140 aa, Artificial Sequence
  Synthetic Construct
MDVFMKGLSKAKEGVVAAAEKTKQGVAEAAGKTKEGVLYVGSKTKEGVVHGVATVAEKTKEQVTNVPGAVVTGVTAVAQKTVEGAGSIAAATGFVKKDQLGKNEEGAPQEGILEDMPVDPDNEAYEMPSEEGYQDYEPEA

SEQ ID NO: 317 - protein, 140 aa, Artificial Sequence; identical to SEQ ID NO: 208
  Synthetic Construct

SEQ ID NO: 318 - protein, 140 aa, Artificial Sequence
  Synthetic Construct
MDVFMKGLSKAKEGVVAAAEKTKQGVAEAAGKTKEGVLYVGSKTKEGVVHGVATVAEKTKEQVTNVKGAVVTGVTAVAQKTVEGAGSIAAATGFVKKDQLGKNEEGAPQEGILEDMPVDPDNEAYEMPSEEGYQDYEPEA

SEQ ID NO: 319 - protein, 140 aa, Artificial Sequence
  Synthetic Construct
MDVFMKGLSKAKEGVVAAAEKTKQGVAEAAGKTKEGVLYVGSKTKEGVVHGVATVAEKTKEQVTNVRGAVVTGVTAVAQKTVEGAGSIAAATGFVKKDQLGKNEEGAPQEGILEDMPVDPDNEAYEMPSEEGYQDYEPEA

SEQ ID NO: 320 - protein, 140 aa, Artificial Sequence
  Synthetic Construct
MDVFMKGLSKAKEGVVAAAEKTKQGVAEAAGKTKEGVLYVGSKTKEGVVHGVATVAEKTKEQVTNVHGAVVTGVTAVAQKTVEGAGSIAAATGFVKKDQLGKNEEGAPQEGILEDMPVDPDNEAYEMPSEEGYQDYEPEA

SEQ ID NO: 321 - protein, 140 aa, Artificial Sequence
  Synthetic Construct
MDVFMKGLSKAKEGVVAAAEKTKQGVAEAAGKTKEGVLYVGSKTKEGVVHGVATVAEKTKEQVTNVEGAVVTGVTAVAQKTVEGAGSIAAATGFVKKDQLGKNEEGAPQEGILEDMPVDPDNEAYEMPSEEGYQDYEPEA

SEQ ID NO: 322 - protein, 140 aa, Artificial Sequence
  Synthetic Construct
MDVFMKGLSKAKEGVVAAAEKTKQGVAEAAGKTKEGVLYVGSKTKEGVVHGVATVAEKTKEQVTNVDGAVVTGVTAVAQKTVEGAGSIAAATGFVKKDQLGKNEEGAPQEGILEDMPVDPDNEAYEMPSEEGYQDYEPEA

SEQ ID NO: 323 - protein, 140 aa, Artificial Sequence
  Synthetic Construct
MDVFMKGLSKAKEGVVAAAEKTKQGVAEAAGKTKEGVLYVGSKTKEGVVHGVATVAEKTKEQVTNVSGAVVTGVTAVAQKTVEGAGSIAAATGFVKKDQLGKNEEGAPQEGILEDMPVDPDNEAYEMPSEEGYQDYEPEA

SEQ ID NO: 324 - protein, 140 aa, Artificial Sequence
  Synthetic Construct
MDVFMKGLSKAKEGVVAAAEKTKQGVAEAAGKTKEGVLYVGSKTKEGVVHGVATVAEKTKEQVTNVTGAVVTGVTAVAQKTVEGAGSIAAATGFVKKDQLGKNEEGAPQEGILEDMPVDPDNEAYEMPSEEGYQDYEPEA

SEQ ID NO: 325 - protein, 140 aa, Artificial Sequence
  Synthetic Construct
MDVFMKGLSKAKEGVVAAAEKTKQGVAEAAGKTKEGVLYVGSKTKEGVVHGVATVAEKTKEQVTNVNGAVVTGVTAVAQKTVEGAGSIAAATGFVKKDQLGKNEEGAPQEGILEDMPVDPDNEAYEMPSEEGYQDYEPEA

SEQ ID NO: 326 - protein, 140 aa, Artificial Sequence
  Synthetic Construct
MDVFMKGLSKAKEGVVAAAEKTKQGVAEAAGKTKEGVLYVGSKTKEGVVHGVATVAEKTKEQVTNVQGAVVTGVTAVAQKTVEGAGSIAAATGFVKKDQLGKNEEGAPQEGILEDMPVDPDNEAYEMPSEEGYQDYEPEA

SEQ ID NO: 327 - protein, 140 aa, Artificial Sequence
  Synthetic Construct
MDVFMKGLSKAKEGVVAAAEKTKQGVAEAAGKTKEGVLYVGSKTKEGVVHGVATVAEKTKEQVTNVCGAVVTGVTAVAQKTVEGAGSIAAATGFVKKDQLGKNEEGAPQEGILEDMPVDPDNEAYEMPSEEGYQDYEPEA

SEQ ID NO: 328 - protein, 140 aa, Artificial Sequence
  Synthetic Construct
MDVFMKGLSKAKEGVVAAAEKTKQGVAEAAGKTKEGVLYVGSKTKEGVVHGVATVAEKTKEQVTNVGPAVVTGVTAVAQKTVEGAGSIAAATGFVKKDQLGKNEEGAPQEGILEDMPVDPDNEAYEMPSEEGYQDYEPEA

SEQ ID NO: 329 - protein, 140 aa, Artificial Sequence; identical to SEQ ID NO: 208
  Synthetic Construct

SEQ ID NO: 330 - protein, 140 aa, Artificial Sequence
  Synthetic Construct
MDVFMKGLSKAKEGVVAAAEKTKQGVAEAAGKTKEGVLYVGSKTKEGVVHGVATVAEKTKEQVTNVGKAVVTGVTAVAQKTVEGAGSIAAATGFVKKDQLGKNEEGAPQEGILEDMPVDPDNEAYEMPSEEGYQDYEPEA

SEQ ID NO: 331 - protein, 140 aa, Artificial Sequence
  Synthetic Construct
MDVFMKGLSKAKEGVVAAAEKTKQGVAEAAGKTKEGVLYVGSKTKEGVVHGVATVAEKTKEQVTNVGRAVVTGVTAVAQKTVEGAGSIAAATGFVKKDQLGKNEEGAPQEGILEDMPVDPDNEAYEMPSEEGYQDYEPEA

SEQ ID NO: 332 - protein, 140 aa, Artificial Sequence
  Synthetic Construct
MDVFMKGLSKAKEGVVAAAEKTKQGVAEAAGKTKEGVLYVGSKTKEGVVHGVATVAEKTKEQVTNVGHAVVTGVTAVAQKTVEGAGSIAAATGFVKKDQLGKNEEGAPQEGILEDMPVDPDNEAYEMPSEEGYQDYEPEA

SEQ ID NO: 333 - protein, 140 aa, Artificial Sequence
  Synthetic Construct
MDVFMKGLSKAKEGVVAAAEKTKQGVAEAAGKTKEGVLYVGSKTKEGVVHGVATVAEKTKEQVTNVGEAVVTGVTAVAQKTVEGAGSIAAATGFVKKDQLGKNEEGAPQEGILEDMPVDPDNEAYEMPSEEGYQDYEPEA

SEQ ID NO: 334 - protein, 140 aa, Artificial Sequence
  Synthetic Construct
MDVFMKGLSKAKEGVVAAAEKTKQGVAEAAGKTKEGVLYVGSKTKEGVVHGVATVAEKTKEQVTNVGDAVVTGVTAVAQKTVEGAGSIAAATGFVKKDQLGKNEEGAPQEGILEDMPVDPDNEAYEMPSEEGYQDYEPEA

SEQ ID NO: 335 - protein, 140 aa, Artificial Sequence
  Synthetic Construct
MDVFMKGLSKAKEGVVAAAEKTKQGVAEAAGKTKEGVLYVGSKTKEGVVHGVATVAEKTKEQVTNVGSAVVTGVTAVAQKTVEGAGSIAAATGFVKKDQLGKNEEGAPQEGILEDMPVDPDNEAYEMPSEEGYQDYEPEA

SEQ ID NO: 336 - protein, 140 aa, Artificial Sequence
  Synthetic Construct
MDVFMKGLSKAKEGVVAAAEKTKQGVAEAAGKTKEGVLYVGSKTKEGVVHGVATVAEKTKEQVTNVGTAVVTGVTAVAQKTVEGAGSIAAATGFVKKDQLGKNEEGAPQEGILEDMPVDPDNEAYEMPSEEGYQDYEPEA

SEQ ID NO: 337 - protein, 140 aa, Artificial Sequence
  Synthetic Construct
MDVFMKGLSKAKEGVVAAAEKTKQGVAEAAGKTKEGVLYVGSKTKEGVVHGVATVAEKTKEQVTNVGNAVVTGVTAVAQKTVEGAGSIAAATGFVKKDQLGKNEEGAPQEGILEDMPVDPDNEAYEMPSEEGYQDYEPEA

SEQ ID NO: 338 - protein, 140 aa, Artificial Sequence
  Synthetic Construct
MDVFMKGLSKAKEGVVAAAEKTKQGVAEAAGKTKEGVLYVGSKTKEGVVHGVATVAEKTKEQVTNVGQAVVTGVTAVAQKTVEGAGSIAAATGFVKKDQLGKNEEGAPQEGILEDMPVDPDNEAYEMPSEEGYQDYEPEA

SEQ ID NO: 339 - protein, 140 aa, Artificial Sequence
  Synthetic Construct
MDVFMKGLSKAKEGVVAAAEKTKQGVAEAAGKTKEGVLYVGSKTKEGVVHGVATVAEKTKEQVTNVGCAVVTGVTAVAQKTVEGAGSIAAATGFVKKDQLGKNEEGAPQEGILEDMPVDPDNEAYEMPSEEGYQDYEPEA

SEQ ID NO: 340 - protein, 140 aa, Artificial Sequence
  Synthetic Construct
MDVFMKGLSKAKEGVVAAAEKTKQGVAEAAGKTKEGVLYVGSKTKEGVVHGVATVAEKTKEQVTNVGGPVVTGVTAVAQKTVEGAGSIAAATGFVKKDQLGKNEEGAPQEGILEDMPVDPDNEAYEMPSEEGYQDYEPEA

SEQ ID NO: 341 - protein, 140 aa, Artificial Sequence
  Synthetic Construct
MDVFMKGLSKAKEGVVAAAEKTKQGVAEAAGKTKEGVLYVGSKTKEGVVHGVATVAEKTKEQVTNVGGGVVTGVTAVAQKTVEGAGSIAAATGFVKKDQLGKNEEGAPQEGILEDMPVDPDNEAYEMPSEEGYQDYEPEA

SEQ ID NO: 342 - protein, 140 aa, Artificial Sequence
  Synthetic Construct
MDVFMKGLSKAKEGVVAAAEKTKQGVAEAAGKTKEGVLYVGSKTKEGVVHGVATVAEKTKEQVTNVGGKVVTGVTAVAQKTVEGAGSIAAATGFVKKDQLGKNEEGAPQEGILEDMPVDPDNEAYEMPSEEGYQDYEPEA

SEQ ID NO: 343 - protein, 140 aa, Artificial Sequence
  Synthetic Construct
MDVFMKGLSKAKEGVVAAAEKTKQGVAEAAGKTKEGVLYVGSKTKEGVVHGVATVAEKTKEQVTNVGGRVVTGVTAVAQKTVEGAGSIAAATGFVKKDQLGKNEEGAPQEGILEDMPVDPDNEAYEMPSEEGYQDYEPEA

SEQ ID NO: 344 - protein, 140 aa, Artificial Sequence
  Synthetic Construct
MDVFMKGLSKAKEGVVAAAEKTKQGVAEAAGKTKEGVLYVGSKTKEGVVHGVATVAEKTKEQVTNVGGHVVTGVTAVAQKTVEGAGSIAAATGFVKKDQLGKNEEGAPQEGILEDMPVDPDNEAYEMPSEEGYQDYEPEA

SEQ ID NO: 345 - protein, 140 aa, Artificial Sequence
  Synthetic Construct
MDVFMKGLSKAKEGVVAAAEKTKQGVAEAAGKTKEGVLYVGSKTKEGVVHGVATVAEKTKEQVTNVGGEVVTGVTAVAQKTVEGAGSIAAATGFVKKDQLGKNEEGAPQEGILEDMPVDPDNEAYEMPSEEGYQDYEPEA

SEQ ID NO: 346 - protein, 140 aa, Artificial Sequence
  Synthetic Construct
MDVFMKGLSKAKEGVVAAAEKTKQGVAEAAGKTKEGVLYVGSKTKEGVVHGVATVAEKTKEQVTNVGGDVVTGVTAVAQKTVEGAGSIAAATGFVKKDQLGKNEEGAPQEGILEDMPVDPDNEAYEMPSEEGYQDYEPEA

SEQ ID NO: 347 - protein, 140 aa, Artificial Sequence
  Synthetic Construct
MDVFMKGLSKAKEGVVAAAEKTKQGVAEAAGKTKEGVLYVGSKTKEGVVHGVATVAEKTKEQVTNVGGSVVTGVTAVAQKTVEGAGSIAAATGFVKKDQLGKNEEGAPQEGILEDMPVDPDNEAYEMPSEEGYQDYEPEA

SEQ ID NO: 348 - protein, 140 aa, Artificial Sequence
  Synthetic Construct
MDVFMKGLSKAKEGVVAAAEKTKQGVAEAAGKTKEGVLYVGSKTKEGVVHGVATVAEKTKEQVTNVGGTVVTGVTAVAQKTVEGAGSIAAATGFVKKDQLGKNEEGAPQEGILEDMPVDPDNEAYEMPSEEGYQDYEPEA

SEQ ID NO: 349 - protein, 140 aa, Artificial Sequence
  Synthetic Construct
MDVFMKGLSKAKEGVVAAAEKTKQGVAEAAGKTKEGVLYVGSKTKEGVVHGVATVAEKTKEQVTNVGGNVVTGVTAVAQKTVEGAGSIAAATGFVKKDQLGKNEEGAPQEGILEDMPVDPDNEAYEMPSEEGYQDYEPEA

SEQ ID NO: 350 - protein, 140 aa, Artificial Sequence
  Synthetic Construct
MDVFMKGLSKAKEGVVAAAEKTKQGVAEAAGKTKEGVLYVGSKTKEGVVHGVATVAEKTKEQVTNVGGQVVTGVTAVAQKTVEGAGSIAAATGFVKKDQLGKNEEGAPQEGILEDMPVDPDNEAYEMPSEEGYQDYEPEA

SEQ ID NO: 351 - protein, 140 aa, Artificial Sequence
  Synthetic Construct
MDVFMKGLSKAKEGVVAAAEKTKQGVAEAAGKTKEGVLYVGSKTKEGVVHGVATVAEKTKEQVTNVGGCVVTGVTAVAQKTVEGAGSIAAATGFVKKDQLGKNEEGAPQEGILEDMPVDPDNEAYEMPSEEGYQDYEPEA

SEQ ID NO: 352 - protein, 140 aa, Artificial Sequence
  Synthetic Construct
MDVFMKGLSKAKEGVVAAAEKTKQGVAEAAGKTKEGVLYVGSKTKEGVVHGVATVAEKTKEQVTNVGGAPVTGVTAVAQKTVEGAGSIAAATGFVKKDQLGKNEEGAPQEGILEDMPVDPDNEAYEMPSEEGYQDYEPEA

SEQ ID NO: 353 - protein, 140 aa, Artificial Sequence
  Synthetic Construct
MDVFMKGLSKAKEGVVAAAEKTKQGVAEAAGKTKEGVLYVGSKTKEGVVHGVATVAEKTKEQVTNVGGAGVTGVTAVAQKTVEGAGSIAAATGFVKKDQLGKNEEGAPQEGILEDMPVDPDNEAYEMPSEEGYQDYEPEA

SEQ ID NO: 354 - protein, 140 aa, Artificial Sequence
  Synthetic Construct
MDVFMKGLSKAKEGVVAAAEKTKQGVAEAAGKTKEGVLYVGSKTKEGVVHGVATVAEKTKEQVTNVGGAKVTGVTAVAQKTVEGAGSIAAATGFVKKDQLGKNEEGAPQEGILEDMPVDPDNEAYEMPSEEGYQDYEPEA

SEQ ID NO: 355 - protein, 140 aa, Artificial Sequence
  Synthetic Construct
MDVFMKGLSKAKEGVVAAAEKTKQGVAEAAGKTKEGVLYVGSKTKEGVVHGVATVAEKTKEQVTNVGGARVTGVTAVAQKTVEGAGSIAAATGFVKKDQLGKNEEGAPQEGILEDMPVDPDNEAYEMPSEEGYQDYEPEA

SEQ ID NO: 356 - protein, 140 aa, Artificial Sequence
  Synthetic Construct
MDVFMKGLSKAKEGVVAAAEKTKQGVAEAAGKTKEGVLYVGSKTKEGVVHGVATVAEKTKEQVTNVGGAHVTGVTAVAQKTVEGAGSIAAATGFVKKDQLGKNEEGAPQEGILEDMPVDPDNEAYEMPSEEGYQDYEPEA

SEQ ID NO: 357 - protein, 140 aa, Artificial Sequence
  Synthetic Construct
MDVFMKGLSKAKEGVVAAAEKTKQGVAEAAGKTKEGVLYVGSKTKEGVVHGVATVAEKTKEQVTNVGGAEVTGVTAVAQKTVEGAGSIAAATGFVKKDQLGKNEEGAPQEGILEDMPVDPDNEAYEMPSEEGYQDYEPEA

SEQ ID NO: 358 - protein, 140 aa, Artificial Sequence
  Synthetic Construct
MDVFMKGLSKAKEGVVAAAEKTKQGVAEAAGKTKEGVLYVGSKTKEGVVHGVATVAEKTKEQVTNVGGADVTGVTAVAQKTVEGAGSIAAATGFVKKDQLGKNEEGAPQEGILEDMPVDPDNEAYEMPSEEGYQDYEPEA

SEQ ID NO: 359 - protein, 140 aa, Artificial Sequence
  Synthetic Construct
MDVFMKGLSKAKEGVVAAAEKTKQGVAEAAGKTKEGVLYVGSKTKEGVVHGVATVAEKTKEQVTNVGGASVTGVTAVAQKTVEGAGSIAAATGFVKKDQLGKNEEGAPQEGILEDMPVDPDNEAYEMPSEEGYQDYEPEA

SEQ ID NO: 360 - protein, 140 aa, Artificial Sequence
  Synthetic Construct
MDVFMKGLSKAKEGVVAAAEKTKQGVAEAAGKTKEGVLYVGSKTKEGVVHGVATVAEKTKEQVTNVGGATVTGVTAVAQKTVEGAGSIAAATGFVKKDQLGKNEEGAPQEGILEDMPVDPDNEAYEMPSEEGYQDYEPEA

SEQ ID NO: 361 - protein, 140 aa, Artificial Sequence
  Synthetic Construct
MDVFMKGLSKAKEGVVAAAEKTKQGVAEAAGKTKEGVLYVGSKTKEGVVHGVATVAEKTKEQVTNVGGANVTGVTAVAQKTVEGAGSIAAATGFVKKDQLGKNEEGAPQEGILEDMPVDPDNEAYEMPSEEGYQDYEPEA

SEQ ID NO: 362 - protein, 140 aa, Artificial Sequence
  Synthetic Construct
MDVFMKGLSKAKEGVVAAAEKTKQGVAEAAGKTKEGVLYVGSKTKEGVVHGVATVAEKTKEQVTNVGGAQVTGVTAVAQKTVEGAGSIAAATGFVKKDQLGKNEEGAPQEGILEDMPVDPDNEAYEMPSEEGYQDYEPEA

SEQ ID NO: 363 - protein, 140 aa, Artificial Sequence
  Synthetic Construct
MDVFMKGLSKAKEGVVAAAEKTKQGVAEAAGKTKEGVLYVGSKTKEGVVHGVATVAEKTKEQVTNVGGACVTGVTAVAQKTVEGAGSIAAATGFVKKDQLGKNEEGAPQEGILEDMPVDPDNEAYEMPSEEGYQDYEPEA

SEQ ID NO: 364 - protein, 140 aa, Artificial Sequence
  Synthetic Construct
MDVFMKGLSKAKEGVVAAAEKTKQGVAEAAGKTKEGVLYVGSKTKEGVVHGVATVAEKTKEQVTNVGGAVPTGVTAVAQKTVEGAGSIAAATGFVKKDQLGKNEEGAPQEGILEDMPVDPDNEAYEMPSEEGYQDYEPEA

SEQ ID NO: 365 - protein, 140 aa, Artificial Sequence
  Synthetic Construct
MDVFMKGLSKAKEGVVAAAEKTKQGVAEAAGKTKEGVLYVGSKTKEGVVHGVATVAEKTKEQVTNVGGAVGTGVTAVAQKTVEGAGSIAAATGFVKKDQLGKNEEGAPQEGILEDMPVDPDNEAYEMPSEEGYQDYEPEA

SEQ ID NO: 366 - protein, 140 aa, Artificial Sequence
  Synthetic Construct
MDVFMKGLSKAKEGVVAAAEKTKQGVAEAAGKTKEGVLYVGSKTKEGVVHGVATVAEKTKEQVTNVGGAVKTGVTAVAQKTVEGAGSIAAATGFVKKDQLGKNEEGAPQEGILEDMPVDPDNEAYEMPSEEGYQDYEPEA

SEQ ID NO: 367 - protein, 140 aa, Artificial Sequence
  Synthetic Construct
MDVFMKGLSKAKEGVVAAAEKTKQGVAEAAGKTKEGVLYVGSKTKEGVVHGVATVAEKTKEQVTNVGGAVRTGVTAVAQKTVEGAGSIAAATGFVKKDQLGKNEEGAPQEGILEDMPVDPDNEAYEMPSEEGYQDYEPEA

SEQ ID NO: 368 - protein, 140 aa, Artificial Sequence
  Synthetic Construct
MDVFMKGLSKAKEGVVAAAEKTKQGVAEAAGKTKEGVLYVGSKTKEGVVHGVATVAEKTKEQVTNVGGAVHTGVTAVAQKTVEGAGSIAAATGFVKKDQLGKNEEGAPQEGILEDMPVDPDNEAYEMPSEEGYQDYEPEA

SEQ ID NO: 369 - protein, 140 aa, Artificial Sequence
  Synthetic Construct
MDVFMKGLSKAKEGVVAAAEKTKQGVAEAAGKTKEGVLYVGSKTKEGVVHGVATVAEKTKEQVTNVGGAVETGVTAVAQKTVEGAGSIAAATGFVKKDQLGKNEEGAPQEGILEDMPVDPDNEAYEMPSEEGYQDYEPEA

SEQ ID NO: 370 - protein, 140 aa, Artificial Sequence
  Synthetic Construct
MDVFMKGLSKAKEGVVAAAEKTKQGVAEAAGKTKEGVLYVGSKTKEGVVHGVATVAEKTKEQVTNVGGAVDTGVTAVAQKTVEGAGSIAAATGFVKKDQLGKNEEGAPQEGILEDMPVDPDNEAYEMPSEEGYQDYEPEA

SEQ ID NO: 371 - protein, 140 aa, Artificial Sequence
  Synthetic Construct
MDVFMKGLSKAKEGVVAAAEKTKQGVAEAAGKTKEGVLYVGSKTKEGVVHGVATVAEKTKEQVTNVGGAVSTGVTAVAQKTVEGAGSIAAATGFVKKDQLGKNEEGAPQEGILEDMPVDPDNEAYEMPSEEGYQDYEPEA

SEQ ID NO: 372 - protein, 140 aa, Artificial Sequence
  Synthetic Construct
MDVFMKGLSKAKEGVVAAAEKTKQGVAEAAGKTKEGVLYVGSKTKEGVVHGVATVAEKTKEQVTNVGGAVTTGVTAVAQKTVEGAGSIAAATGFVKKDQLGKNEEGAPQEGILEDMPVDPDNEAYEMPSEEGYQDYEPEA

SEQ ID NO: 373 - protein, 140 aa, Artificial Sequence
  Synthetic Construct
MDVFMKGLSKAKEGVVAAAEKTKQGVAEAAGKTKEGVLYVGSKTKEGVVHGVATVAEKTKEQVTNVGGAVNTGVTAVAQKTVEGAGSIAAATGFVKKDQLGKNEEGAPQEGILEDMPVDPDNEAYEMPSEEGYQDYEPEA

SEQ ID NO: 374 - protein, 140 aa, Artificial Sequence
  Synthetic Construct
MDVFMKGLSKAKEGVVAAAEKTKQGVAEAAGKTKEGVLYVGSKTKEGVVHGVATVAEKTKEQVTNVGGAVQTGVTAVAQKTVEGAGSIAAATGFVKKDQLGKNEEGAPQEGILEDMPVDPDNEAYEMPSEEGYQDYEPEA

SEQ ID NO: 375 - protein, 140 aa, Artificial Sequence
  Synthetic Construct
MDVFMKGLSKAKEGVVAAAEKTKQGVAEAAGKTKEGVLYVGSKTKEGVVHGVATVAEKTKEQVTNVGGAVCTGVTAVAQKTVEGAGSIAAATGFVKKDQLGKNEEGAPQEGILEDMPVDPDNEAYEMPSEEGYQDYEPEA

SEQ ID NO: 376 - protein, 140 aa, Artificial Sequence
  Synthetic Construct
MDVFMKGLSKAKEGVVAAAEKTKQGVAEAAGKTKEGVLYVGSKTKEGVVHGVATVAEKTKEQVTNVGGAVVPGVTAVAQKTVEGAGSIAAATGFVKKDQLGKNEEGAPQEGILEDMPVDPDNEAYEMPSEEGYQDYEPEA

SEQ ID NO: 377 - protein, 140 aa, Artificial Sequence
  Synthetic Construct
MDVFMKGLSKAKEGVVAAAEKTKQGVAEAAGKTKEGVLYVGSKTKEGVVHGVATVAEKTKEQVTNVGGAVVGGVTAVAQKTVEGAGSIAAATGFVKKDQLGKNEEGAPQEGILEDMPVDPDNEAYEMPSEEGYQDYEPEA

SEQ ID NO: 378 - protein, 140 aa, Artificial Sequence
  Synthetic Construct
MDVFMKGLSKAKEGVVAAAEKTKQGVAEAAGKTKEGVLYVGSKTKEGVVHGVATVAEKTKEQVTNVGGAVVKGVTAVAQKTVEGAGSIAAATGFVKKDQLGKNEEGAPQEGILEDMPVDPDNEAYEMPSEEGYQDYEPEA

SEQ ID NO: 379 - protein, 140 aa, Artificial Sequence
  Synthetic Construct
MDVFMKGLSKAKEGVVAAAEKTKQGVAEAAGKTKEGVLYVGSKTKEGVVHGVATVAEKTKEQVTNVGGAVVRGVTAVAQKTVEGAGSIAAATGFVKKDQLGKNEEGAPQEGILEDMPVDPDNEAYEMPSEEGYQDYEPEA

SEQ ID NO: 380 - protein, 140 aa, Artificial Sequence
  Synthetic Construct
MDVFMKGLSKAKEGVVAAAEKTKQGVAEAAGKTKEGVLYVGSKTKEGVVHGVATVAEKTKEQVTNVGGAVVHGVTAVAQKTVEGAGSIAAATGFVKKDQLGKNEEGAPQEGILEDMPVDPDNEAYEMPSEEGYQDYEPEA

SEQ ID NO: 381 - protein, 140 aa, Artificial Sequence
  Synthetic Construct
MDVFMKGLSKAKEGVVAAAEKTKQGVAEAAGKTKEGVLYVGSKTKEGVVHGVATVAEKTKEQVTNVGGAVVEGVTAVAQKTVEGAGSIAAATGFVKKDQLGKNEEGAPQEGILEDMPVDPDNEAYEMPSEEGYQDYEPEA

SEQ ID NO: 382 - protein, 140 aa, Artificial Sequence
  Synthetic Construct
MDVFMKGLSKAKEGVVAAAEKTKQGVAEAAGKTKEGVLYVGSKTKEGVVHGVATVAEKTKEQVTNVGGAVVDGVTAVAQKTVEGAGSIAAATGFVKKDQLGKNEEGAPQEGILEDMPVDPDNEAYEMPSEEGYQDYEPEA

SEQ ID NO: 383 - protein, 140 aa, Artificial Sequence
  Synthetic Construct
MDVFMKGLSKAKEGVVAAAEKTKQGVAEAAGKTKEGVLYVGSKTKEGVVHGVATVAEKTKEQVTNVGGAVVSGVTAVAQKTVEGAGSIAAATGFVKKDQLGKNEEGAPQEGILEDMPVDPDNEAYEMPSEEGYQDYEPEA

SEQ ID NO: 384 - protein, 140 aa, Artificial Sequence; identical to SEQ ID NO: 208
  Synthetic Construct

SEQ ID NO: 385 - protein, 140 aa, Artificial Sequence
  Synthetic Construct
MDVFMKGLSKAKEGVVAAAEKTKQGVAEAAGKTKEGVLYVGSKTKEGVVHGVATVAEKTKEQVTNVGGAVVNGVTAVAQKTVEGAGSIAAATGFVKKDQLGKNEEGAPQEGILEDMPVDPDNEAYEMPSEEGYQDYEPEA

SEQ ID NO: 386 - protein, 140 aa, Artificial Sequence
  Synthetic Construct
MDVFMKGLSKAKEGVVAAAEKTKQGVAEAAGKTKEGVLYVGSKTKEGVVHGVATVAEKTKEQVTNVGGAVVQGVTAVAQKTVEGAGSIAAATGFVKKDQLGKNEEGAPQEGILEDMPVDPDNEAYEMPSEEGYQDYEPEA

SEQ ID NO: 387 - protein, 140 aa, Artificial Sequence
  Synthetic Construct
MDVFMKGLSKAKEGVVAAAEKTKQGVAEAAGKTKEGVLYVGSKTKEGVVHGVATVAEKTKEQVTNVGGAVVCGVTAVAQKTVEGAGSIAAATGFVKKDQLGKNEEGAPQEGILEDMPVDPDNEAYEMPSEEGYQDYEPEA

SEQ ID NO: 388 - protein, 140 aa, Artificial Sequence
  Synthetic Construct
MDVFMKGLSKAKEGVVAAAEKTKQGVAEAAGKTKEGVLYVGSKTKEGVVHGVATVAEKTKEQVTNVGGAVVTPVTAVAQKTVEGAGSIAAATGFVKKDQLGKNEEGAPQEGILEDMPVDPDNEAYEMPSEEGYQDYEPEA

SEQ ID NO: 389 - protein, 140 aa, Artificial Sequence; identical to SEQ ID NO: 208
  Synthetic Construct

SEQ ID NO: 390 - protein, 140 aa, Artificial Sequence
  Synthetic Construct
MDVFMKGLSKAKEGVVAAAEKTKQGVAEAAGKTKEGVLYVGSKTKEGVVHGVATVAEKTKEQVTNVGGAVVTKVTAVAQKTVEGAGSIAAATGFVKKDQLGKNEEGAPQEGILEDMPVDPDNEAYEMPSEEGYQDYEPEA

SEQ ID NO: 391 - protein, 140 aa, Artificial Sequence
  Synthetic Construct
MDVFMKGLSKAKEGVVAAAEKTKQGVAEAAGKTKEGVLYVGSKTKEGVVHGVATVAEKTKEQVTNVGGAVVTRVTAVAQKTVEGAGSIAAATGFVKKDQLGKNEEGAPQEGILEDMPVDPDNEAYEMPSEEGYQDYEPEA

SEQ ID NO: 392 - protein, 140 aa, Artificial Sequence
  Synthetic Construct
MDVFMKGLSKAKEGVVAAAEKTKQGVAEAAGKTKEGVLYVGSKTKEGVVHGVATVAEKTKEQVTNVGGAVVTHVTAVAQKTVEGAGSIAAATGFVKKDQLGKNEEGAPQEGILEDMPVDPDNEAYEMPSEEGYQDYEPEA

SEQ ID NO: 393 - protein, 140 aa, Artificial Sequence
  Synthetic Construct
MDVFMKGLSKAKEGVVAAAEKTKQGVAEAAGKTKEGVLYVGSKTKEGVVHGVATVAEKTKEQVTNVGGAVVTEVTAVAQKTVEGAGSIAAATGFVKKDQLGKNEEGAPQEGILEDMPVDPDNEAYEMPSEEGYQDYEPEA

SEQ ID NO: 394 - protein, 140 aa, Artificial Sequence
  Synthetic Construct
MDVFMKGLSKAKEGVVAAAEKTKQGVAEAAGKTKEGVLYVGSKTKEGVVHGVATVAEKTKEQVTNVGGAVVTDVTAVAQKTVEGAGSIAAATGFVKKDQLGKNEEGAPQEGILEDMPVDPDNEAYEMPSEEGYQDYEPEA

SEQ ID NO: 395 - protein, 140 aa, Artificial Sequence
  Synthetic Construct
MDVFMKGLSKAKEGVVAAAEKTKQGVAEAAGKTKEGVLYVGSKTKEGVVHGVATVAEKTKEQVTNVGGAVVTSVTAVAQKTVEGAGSIAAATGFVKKDQLGKNEEGAPQEGILEDMPVDPDNEAYEMPSEEGYQDYEPEA

SEQ ID NO: 396 - protein, 140 aa, Artificial Sequence
  Synthetic Construct
MDVFMKGLSKAKEGVVAAAEKTKQGVAEAAGKTKEGVLYVGSKTKEGVVHGVATVAEKTKEQVTNVGGAVVTTVTAVAQKTVEGAGSIAAATGFVKKDQLGKNEEGAPQEGILEDMPVDPDNEAYEMPSEEGYQDYEPEA

SEQ ID NO: 397 - protein, 140 aa, Artificial Sequence
  Synthetic Construct
MDVFMKGLSKAKEGVVAAAEKTKQGVAEAAGKTKEGVLYVGSKTKEGVVHGVATVAEKTKEQVTNVGGAVVTNVTAVAQKTVEGAGSIAAATGFVKKDQLGKNEEGAPQEGILEDMPVDPDNEAYEMPSEEGYQDYEPEA

SEQ ID NO: 398 - protein, 140 aa, Artificial Sequence
  Synthetic Construct
MDVFMKGLSKAKEGVVAAAEKTKQGVAEAAGKTKEGVLYVGSKTKEGVVHGVATVAEKTKEQVTNVGGAVVTQVTAVAQKTVEGAGSIAAATGFVKKDQLGKNEEGAPQEGILEDMPVDPDNEAYEMPSEEGYQDYEPEA

SEQ ID NO: 399 - protein, 140 aa, Artificial Sequence
  Synthetic Construct
MDVFMKGLSKAKEGVVAAAEKTKQGVAEAAGKTKEGVLYVGSKTKEGVVHGVATVAEKTKEQVTNVGGAVVTCVTAVAQKTVEGAGSIAAATGFVKKDQLGKNEEGAPQEGILEDMPVDPDNEAYEMPSEEGYQDYEPEA

SEQ ID NO: 400 - protein, 140 aa, Artificial Sequence
  Synthetic Construct
MDVFMKGLSKAKEGVVAAAEKTKQGVAEAAGKTKEGVLYVGSKTKEGVVHGVATVAEKTKEQVTNVGGAVVTGPTAVAQKTVEGAGSIAAATGFVKKDQLGKNEEGAPQEGILEDMPVDPDNEAYEMPSEEGYQDYEPEA

SEQ ID NO: 401 - protein, 140 aa, Artificial Sequence
  Synthetic Construct
MDVFMKGLSKAKEGVVAAAEKTKQGVAEAAGKTKEGVLYVGSKTKEGVVHGVATVAEKTKEQVTNVGGAVVTGGTAVAQKTVEGAGSIAAATGFVKKDQLGKNEEGAPQEGILEDMPVDPDNEAYEMPSEEGYQDYEPEA

SEQ ID NO: 402 - protein, 140 aa, Artificial Sequence
  Synthetic Construct
MDVFMKGLSKAKEGVVAAAEKTKQGVAEAAGKTKEGVLYVGSKTKEGVVHGVATVAEKTKEQVTNVGGAVVTGKTAVAQKTVEGAGSIAAATGFVKKDQLGKNEEGAPQEGILEDMPVDPDNEAYEMPSEEGYQDYEPEA

SEQ ID NO: 403 - protein, 140 aa, Artificial Sequence
  Synthetic Construct
MDVFMKGLSKAKEGVVAAAEKTKQGVAEAAGKTKEGVLYVGSKTKEGVVHGVATVAEKTKEQVTNVGGAVVTGRTAVAQKTVEGAGSIAAATGFVKKDQLGKNEEGAPQEGILEDMPVDPDNEAYEMPSEEGYQDYEPEA

SEQ ID NO: 404 - protein, 140 aa, Artificial Sequence
  Synthetic Construct
MDVFMKGLSKAKEGVVAAAEKTKQGVAEAAGKTKEGVLYVGSKTKEGVVHGVATVAEKTKEQVTNVGGAVVTGHTAVAQKTVEGAGSIAAATGFVKKDQLGKNEEGAPQEGILEDMPVDPDNEAYEMPSEEGYQDYEPEA

SEQ ID NO: 405 - protein, 140 aa, Artificial Sequence
  Synthetic Construct
MDVFMKGLSKAKEGVVAAAEKTKQGVAEAAGKTKEGVLYVGSKTKEGVVHGVATVAEKTKEQVTNVGGAVVTGETAVAQKTVEGAGSIAAATGFVKKDQLGKNEEGAPQEGILEDMPVDPDNEAYEMPSEEGYQDYEPEA

SEQ ID NO: 406 - protein, 140 aa, Artificial Sequence
  Synthetic Construct
MDVFMKGLSKAKEGVVAAAEKTKQGVAEAAGKTKEGVLYVGSKTKEGVVHGVATVAEKTKEQVTNVGGAVVTGDTAVAQKTVEGAGSIAAATGFVKKDQLGKNEEGAPQEGILEDMPVDPDNEAYEMPSEEGYQDYEPEA

SEQ ID NO: 407 - protein, 140 aa, Artificial Sequence
  Synthetic Construct
MDVFMKGLSKAKEGVVAAAEKTKQGVAEAAGKTKEGVLYVGSKTKEGVVHGVATVAEKTKEQVTNVGGAVVTGSTAVAQKTVEGAGSIAAATGFVKKDQLGKNEEGAPQEGILEDMPVDPDNEAYEMPSEEGYQDYEPEA

SEQ ID NO: 408 - protein, 140 aa, Artificial Sequence
  Synthetic Construct
MDVFMKGLSKAKEGVVAAAEKTKQGVAEAAGKTKEGVLYVGSKTKEGVVHGVATVAEKTKEQVTNVGGAVVTGTTAVAQKTVEGAGSIAAATGFVKKDQLGKNEEGAPQEGILEDMPVDPDNEAYEMPSEEGYQDYEPEA

SEQ ID NO: 409 - protein, 140 aa, Artificial Sequence
  Synthetic Construct
MDVFMKGLSKAKEGVVAAAEKTKQGVAEAAGKTKEGVLYVGSKTKEGVVHGVATVAEKTKEQVTNVGGAVVTGNTAVAQKTVEGAGSIAAATGFVKKDQLGKNEEGAPQEGILEDMPVDPDNEAYEMPSEEGYQDYEPEA

SEQ ID NO: 410 - protein, 140 aa, Artificial Sequence
  Synthetic Construct
MDVFMKGLSKAKEGVVAAAEKTKQGVAEAAGKTKEGVLYVGSKTKEGVVHGVATVAEKTKEQVTNVGGAVVTGQTAVAQKTVEGAGSIAAATGFVKKDQLGKNEEGAPQEGILEDMPVDPDNEAYEMPSEEGYQDYEPEA

SEQ ID NO: 411 - protein, 140 aa, Artificial Sequence
  Synthetic Construct
MDVFMKGLSKAKEGVVAAAEKTKQGVAEAAGKTKEGVLYVGSKTKEGVVHGVATVAEKTKEQVTNVGGAVVTGCTAVAQKTVEGAGSIAAATGFVKKDQLGKNEEGAPQEGILEDMPVDPDNEAYEMPSEEGYQDYEPEA

SEQ ID NO: 412 - protein, 140 aa, Artificial Sequence
  Synthetic Construct
MDVFMKGLSKAKEGVVAAAEKTKQGVAEAAGKTKEGVLYVGSKTKEGVVHGVATVAEKTKEQVTNVGGAVVTGVPAVAQKTVEGAGSIAAATGFVKKDQLGKNEEGAPQEGILEDMPVDPDNEAYEMPSEEGYQDYEPEA

SEQ ID NO: 413 - protein, 140 aa, Artificial Sequence
  Synthetic Construct
MDVFMKGLSKAKEGVVAAAEKTKQGVAEAAGKTKEGVLYVGSKTKEGVVHGVATVAEKTKEQVTNVGGAVVTGVGAVAQKTVEGAGSIAAATGFVKKDQLGKNEEGAPQEGILEDMPVDPDNEAYEMPSEEGYQDYEPEA

SEQ ID NO: 414 - protein, 140 aa, Artificial Sequence
  Synthetic Construct
MDVFMKGLSKAKEGVVAAAEKTKQGVAEAAGKTKEGVLYVGSKTKEGVVHGVATVAEKTKEQVTNVGGAVVTGVKAVAQKTVEGAGSIAAATGFVKKDQLGKNEEGAPQEGILEDMPVDPDNEAYEMPSEEGYQDYEPEA

SEQ ID NO: 415 - protein, 140 aa, Artificial Sequence
  Synthetic Construct
MDVFMKGLSKAKEGVVAAAEKTKQGVAEAAGKTKEGVLYVGSKTKEGVVHGVATVAEKTKEQVTNVGGAVVTGVRAVAQKTVEGAGSIAAATGFVKKDQLGKNEEGAPQEGILEDMPVDPDNEAYEMPSEEGYQDYEPEA

SEQ ID NO: 416 - protein, 140 aa, Artificial Sequence
  Synthetic Construct
MDVFMKGLSKAKEGVVAAAEKTKQGVAEAAGKTKEGVLYVGSKTKEGVVHGVATVAEKTKEQVTNVGGAVVTGVHAVAQKTVEGAGSIAAATGFVKKDQLGKNEEGAPQEGILEDMPVDPDNEAYEMPSEEGYQDYEPEA

SEQ ID NO: 417 - protein, 140 aa, Artificial Sequence
  Synthetic Construct
MDVFMKGLSKAKEGVVAAAEKTKQGVAEAAGKTKEGVLYVGSKTKEGVVHGVATVAEKTKEQVTNVGGAVVTGVEAVAQKTVEGAGSIAAATGFVKKDQLGKNEEGAPQEGILEDMPVDPDNEAYEMPSEEGYQDYEPEA

SEQ ID NO: 418 - protein, 140 aa, Artificial Sequence
  Synthetic Construct
MDVFMKGLSKAKEGVVAAAEKTKQGVAEAAGKTKEGVLYVGSKTKEGVVHGVATVAEKTKEQVTNVGGAVVTGVDAVAQKTVEGAGSIAAATGFVKKDQLGKNEEGAPQEGILEDMPVDPDNEAYEMPSEEGYQDYEPEA

SEQ ID NO: 419 - protein, 140 aa, Artificial Sequence
  Synthetic Construct
MDVFMKGLSKAKEGVVAAAEKTKQGVAEAAGKTKEGVLYVGSKTKEGVVHGVATVAEKTKEQVTNVGGAVVTGVSAVAQKTVEGAGSIAAATGFVKKDQLGKNEEGAPQEGILEDMPVDPDNEAYEMPSEEGYQDYEPEA

SEQ ID NO: 420 - protein, 140 aa, Artificial Sequence; identical to SEQ ID NO: 208
  Synthetic Construct

SEQ ID NO: 421 - protein, 140 aa, Artificial Sequence
  Synthetic Construct
MDVFMKGLSKAKEGVVAAAEKTKQGVAEAAGKTKEGVLYVGSKTKEGVVHGVATVAEKTKEQVTNVGGAVVTGVNAVAQKTVEGAGSIAAATGFVKKDQLGKNEEGAPQEGILEDMPVDPDNEAYEMPSEEGYQDYEPEA

SEQ ID NO: 422 - protein, 140 aa, Artificial Sequence
  Synthetic Construct
MDVFMKGLSKAKEGVVAAAEKTKQGVAEAAGKTKEGVLYVGSKTKEGVVHGVATVAEKTKEQVTNVGGAVVTGVQAVAQKTVEGAGSIAAATGFVKKDQLGKNEEGAPQEGILEDMPVDPDNEAYEMPSEEGYQDYEPEA

SEQ ID NO: 423 - protein, 140 aa, Artificial Sequence
  Synthetic Construct
MDVFMKGLSKAKEGVVAAAEKTKQGVAEAAGKTKEGVLYVGSKTKEGVVHGVATVAEKTKEQVTNVGGAVVTGVCAVAQKTVEGAGSIAAATGFVKKDQLGKNEEGAPQEGILEDMPVDPDNEAYEMPSEEGYQDYEPEA

SEQ ID NO: 424 - protein, 140 aa, Artificial Sequence
  Synthetic Construct
MDVFMKGLSKAKEGVVAAAEKTKQGVAEAAGKTKEGVLYVGSKTKEGVVHGVATVAEKTKEQVTNVGGAVVTGVTPVAQKTVEGAGSIAAATGFVKKDQLGKNEEGAPQEGILEDMPVDPDNEAYEMPSEEGYQDYEPEA

SEQ ID NO: 425 - protein, 140 aa, Artificial Sequence
  Synthetic Construct
MDVFMKGLSKAKEGVVAAAEKTKQGVAEAAGKTKEGVLYVGSKTKEGVVHGVATVAEKTKEQVTNVGGAVVTGVTGVAQKTVEGAGSIAAATGFVKKDQLGKNEEGAPQEGILEDMPVDPDNEAYEMPSEEGYQDYEPEA

SEQ ID NO: 426 - protein, 140 aa, Artificial Sequence
  Synthetic Construct
MDVFMKGLSKAKEGVVAAAEKTKQGVAEAAGKTKEGVLYVGSKTKEGVVHGVATVAEKTKEQVTNVGGAVVTGVTKVAQKTVEGAGSIAAATGFVKKDQLGKNEEGAPQEGILEDMPVDPDNEAYEMPSEEGYQDYEPEA

SEQ ID NO: 427 - protein, 140 aa, Artificial Sequence
  Synthetic Construct
MDVFMKGLSKAKEGVVAAAEKTKQGVAEAAGKTKEGVLYVGSKTKEGVVHGVATVAEKTKEQVTNVGGAVVTGVTRVAQKTVEGAGSIAAATGFVKKDQLGKNEEGAPQEGILEDMPVDPDNEAYEMPSEEGYQDYEPEA

SEQ ID NO: 428 - protein, 140 aa, Artificial Sequence
  Synthetic Construct
MDVFMKGLSKAKEGVVAAAEKTKQGVAEAAGKTKEGVLYVGSKTKEGVVHGVATVAEKTKEQVTNVGGAVVTGVTHVAQKTVEGAGSIAAATGFVKKDQLGKNEEGAPQEGILEDMPVDPDNEAYEMPSEEGYQDYEPEA

SEQ ID NO: 429 - protein, 140 aa, Artificial Sequence
  Synthetic Construct
MDVFMKGLSKAKEGVVAAAEKTKQGVAEAAGKTKEGVLYVGSKTKEGVVHGVATVAEKTKEQVTNVGGAVVTGVTEVAQKTVEGAGSIAAATGFVKKDQLGKNEEGAPQEGILEDMPVDPDNEAYEMPSEEGYQDYEPEA

SEQ ID NO: 430 - protein, 140 aa, Artificial Sequence
  Synthetic Construct
MDVFMKGLSKAKEGVVAAAEKTKQGVAEAAGKTKEGVLYVGSKTKEGVVHGVATVAEKTKEQVTNVGGAVVTGVTDVAQKTVEGAGSIAAATGFVKKDQLGKNEEGAPQEGILEDMPVDPDNEAYEMPSEEGYQDYEPEA

SEQ ID NO: 431 - protein, 140 aa, Artificial Sequence
  Synthetic Construct
MDVFMKGLSKAKEGVVAAAEKTKQGVAEAAGKTKEGVLYVGSKTKEGVVHGVATVAEKTKEQVTNVGGAVVTGVTSVAQKTVEGAGSIAAATGFVKKDQLGKNEEGAPQEGILEDMPVDPDNEAYEMPSEEGYQDYEPEA

SEQ ID NO: 432 - protein, 140 aa, Artificial Sequence
  Synthetic Construct
MDVFMKGLSKAKEGVVAAAEKTKQGVAEAAGKTKEGVLYVGSKTKEGVVHGVATVAEKTKEQVTNVGGAVVTGVTTVAQKTVEGAGSIAAATGFVKKDQLGKNEEGAPQEGILEDMPVDPDNEAYEMPSEEGYQDYEPEA

SEQ ID NO: 433 - protein, 140 aa, Artificial Sequence
  Synthetic Construct
MDVFMKGLSKAKEGVVAAAEKTKQGVAEAAGKTKEGVLYVGSKTKEGVVHGVATVAEKTKEQVTNVGGAVVTGVTNVAQKTVEGAGSIAAATGFVKKDQLGKNEEGAPQEGILEDMPVDPDNEAYEMPSEEGYQDYEPEA

SEQ ID NO: 434 - protein, 140 aa, Artificial Sequence
  Synthetic Construct
MDVFMKGLSKAKEGVVAAAEKTKQGVAEAAGKTKEGVLYVGSKTKEGVVHGVATVAEKTKEQVTNVGGAVVTGVTQVAQKTVEGAGSIAAATGFVKKDQLGKNEEGAPQEGILEDMPVDPDNEAYEMPSEEGYQDYEPEA

SEQ ID NO: 435 - protein, 140 aa, Artificial Sequence
  Synthetic Construct
MDVFMKGLSKAKEGVVAAAEKTKQGVAEAAGKTKEGVLYVGSKTKEGVVHGVATVAEKTKEQVTNVGGAVVTGVTCVAQKTVEGAGSIAAATGFVKKDQLGKNEEGAPQEGILEDMPVDPDNEAYEMPSEEGYQDYEPEA

SEQ ID NO: 436 - protein, 140 aa, Artificial Sequence
  Synthetic Construct
MDVFMKGLSKAKEGVVAAAEKTKQGVAEAAGKTKEGVLYVGSKTKEGVVHGVATVAEKTKEQVTNVGGAVVTGVTAPAQKTVEGAGSIAAATGFVKKDQLGKNEEGAPQEGILEDMPVDPDNEAYEMPSEEGYQDYEPEA

SEQ ID NO: 437 - protein, 140 aa, Artificial Sequence
  Synthetic Construct
MDVFMKGLSKAKEGVVAAAEKTKQGVAEAAGKTKEGVLYVGSKTKEGVVHGVATVAEKTKEQVTNVGGAVVTGVTAGAQKTVEGAGSIAAATGFVKKDQLGKNEEGAPQEGILEDMPVDPDNEAYEMPSEEGYQDYEPEA

SEQ ID NO: 438 - protein, 140 aa, Artificial Sequence
  Synthetic Construct
MDVFMKGLSKAKEGVVAAAEKTKQGVAEAAGKTKEGVLYVGSKTKEGVVHGVATVAEKTKEQVTNVGGAVVTGVTAKAQKTVEGAGSIAAATGFVKKDQLGKNEEGAPQEGILEDMPVDPDNEAYEMPSEEGYQDYEPEA

SEQ ID NO: 439 - protein, 140 aa, Artificial Sequence
  Synthetic Construct
MDVFMKGLSKAKEGVVAAAEKTKQGVAEAAGKTKEGVLYVGSKTKEGVVHGVATVAEKTKEQVTNVGGAVVTGVTARAQKTVEGAGSIAAATGFVKKDQLGKNEEGAPQEGILEDMPVDPDNEAYEMPSEEGYQDYEPEA

SEQ ID NO: 440 - protein, 140 aa, Artificial Sequence
  Synthetic Construct
MDVFMKGLSKAKEGVVAAAEKTKQGVAEAAGKTKEGVLYVGSKTKEGVVHGVATVAEKTKEQVTNVGGAVVTGVTAHAQKTVEGAGSIAAATGFVKKDQLGKNEEGAPQEGILEDMPVDPDNEAYEMPSEEGYQDYEPEA

SEQ ID NO: 441 - protein, 140 aa, Artificial Sequence
  Synthetic Construct
MDVFMKGLSKAKEGVVAAAEKTKQGVAEAAGKTKEGVLYVGSKTKEGVVHGVATVAEKTKEQVTNVGGAVVTGVTAEAQKTVEGAGSIAAATGFVKKDQLGKNEEGAPQEGILEDMPVDPDNEAYEMPSEEGYQDYEPEA

SEQ ID NO: 442 - protein, 140 aa, Artificial Sequence
  Synthetic Construct
MDVFMKGLSKAKEGVVAAAEKTKQGVAEAAGKTKEGVLYVGSKTKEGVVHGVATVAEKTKEQVTNVGGAVVTGVTADAQKTVEGAGSIAAATGFVKKDQLGKNEEGAPQEGILEDMPVDPDNEAYEMPSEEGYQDYEPEA

SEQ ID NO: 443 - protein, 140 aa, Artificial Sequence
  Synthetic Construct
MDVFMKGLSKAKEGVVAAAEKTKQGVAEAAGKTKEGVLYVGSKTKEGVVHGVATVAEKTKEQVTNVGGAVVTGVTASAQKTVEGAGSIAAATGFVKKDQLGKNEEGAPQEGILEDMPVDPDNEAYEMPSEEGYQDYEPEA

SEQ ID NO: 444 - protein, 140 aa, Artificial Sequence
  Synthetic Construct
MDVFMKGLSKAKEGVVAAAEKTKQGVAEAAGKTKEGVLYVGSKTKEGVVHGVATVAEKTKEQVTNVGGAVVTGVTATAQKTVEGAGSIAAATGFVKKDQLGKNEEGAPQEGILEDMPVDPDNEAYEMPSEEGYQDYEPEA

SEQ ID NO: 445 - protein, 140 aa, Artificial Sequence
  Synthetic Construct
MDVFMKGLSKAKEGVVAAAEKTKQGVAEAAGKTKEGVLYVGSKTKEGVVHGVATVAEKTKEQVTNVGGAVVTGVTANAQKTVEGAGSIAAATGFVKKDQLGKNEEGAPQEGILEDMPVDPDNEAYEMPSEEGYQDYEPEA

SEQ ID NO: 446 - protein, 140 aa, Artificial Sequence
  Synthetic Construct
MDVFMKGLSKAKEGVVAAAEKTKQGVAEAAGKTKEGVLYVGSKTKEGVVHGVATVAEKTKEQVTNVGGAVVTGVTAQAQKTVEGAGSIAAATGFVKKDQLGKNEEGAPQEGILEDMPVDPDNEAYEMPSEEGYQDYEPEA

SEQ ID NO: 447 - protein, 140 aa, Artificial Sequence
  Synthetic Construct
MDVFMKGLSKAKEGVVAAAEKTKQGVAEAAGKTKEGVLYVGSKTKEGVVHGVATVAEKTKEQVTNVGGAVVTGVTACAQKTVEGAGSIAAATGFVKKDQLGKNEEGAPQEGILEDMPVDPDNEAYEMPSEEGYQDYEPEA

SEQ ID NO: 448 - protein, 140 aa, Artificial Sequence
  Synthetic Construct
MDVFMKGLSKAKEGVVAAAEKTKQGVAEAAGKTKEGVLYVGSKTKEGVVHGVATVAEKTKEQVTNVGGAVVTGVTAVPQKTVEGAGSIAAATGFVKKDQLGKNEEGAPQEGILEDMPVDPDNEAYEMPSEEGYQDYEPEA

SEQ ID NO: 449 - protein, 140 aa, Artificial Sequence
  Synthetic Construct
MDVFMKGLSKAKEGVVAAAEKTKQGVAEAAGKTKEGVLYVGSKTKEGVVHGVATVAEKTKEQVTNVGGAVVTGVTAVGQKTVEGAGSIAAATGFVKKDQLGKNEEGAPQEGILEDMPVDPDNEAYEMPSEEGYQDYEPEA

SEQ ID NO: 450 - protein, 140 aa, Artificial Sequence
  Synthetic Construct
MDVFMKGLSKAKEGVVAAAEKTKQGVAEAAGKTKEGVLYVGSKTKEGVVHGVATVAEKTKEQVTNVGGAVVTGVTAVKQKTVEGAGSIAAATGFVKKDQLGKNEEGAPQEGILEDMPVDPDNEAYEMPSEEGYQDYEPEA

SEQ ID NO: 451 - protein, 140 aa, Artificial Sequence
  Synthetic Construct
MDVFMKGLSKAKEGVVAAAEKTKQGVAEAAGKTKEGVLYVGSKTKEGVVHGVATVAEKTKEQVTNVGGAVVTGVTAVRQKTVEGAGSIAAATGFVKKDQLGKNEEGAPQEGILEDMPVDPDNEAYEMPSEEGYQDYEPEA

SEQ ID NO: 452 - protein, 140 aa, Artificial Sequence
  Synthetic Construct
MDVFMKGLSKAKEGVVAAAEKTKQGVAEAAGKTKEGVLYVGSKTKEGVVHGVATVAEKTKEQVTNVGGAVVTGVTAVHQKTVEGAGSIAAATGFVKKDQLGKNEEGAPQEGILEDMPVDPDNEAYEMPSEEGYQDYEPEA

SEQ ID NO: 453 - protein, 140 aa, Artificial Sequence
  Synthetic Construct
MDVFMKGLSKAKEGVVAAAEKTKQGVAEAAGKTKEGVLYVGSKTKEGVVHGVATVAEKTKEQVTNVGGAVVTGVTAVEQKTVEGAGSIAAATGFVKKDQLGKNEEGAPQEGILEDMPVDPDNEAYEMPSEEGYQDYEPEA

SEQ ID NO: 454 - protein, 140 aa, Artificial Sequence
  Synthetic Construct
MDVFMKGLSKAKEGVVAAAEKTKQGVAEAAGKTKEGVLYVGSKTKEGVVHGVATVAEKTKEQVTNVGGAVVTGVTAVDQKTVEGAGSIAAATGFVKKDQLGKNEEGAPQEGILEDMPVDPDNEAYEMPSEEGYQDYEPEA

SEQ ID NO: 455 - protein, 140 aa, Artificial Sequence
  Synthetic Construct
MDVFMKGLSKAKEGVVAAAEKTKQGVAEAAGKTKEGVLYVGSKTKEGVVHGVATVAEKTKEQVTNVGGAVVTGVTAVSQKTVEGAGSIAAATGFVKKDQLGKNEEGAPQEGILEDMPVDPDNEAYEMPSEEGYQDYEPEA

SEQ ID NO: 456 - protein, 140 aa, Artificial Sequence
  Synthetic Construct
MDVFMKGLSKAKEGVVAAAEKTKQGVAEAAGKTKEGVLYVGSKTKEGVVHGVATVAEKTKEQVTNVGGAVVTGVTAVTQKTVEGAGSIAAATGFVKKDQLGKNEEGAPQEGILEDMPVDPDNEAYEMPSEEGYQDYEPEA

SEQ ID NO: 457 - protein, 140 aa, Artificial Sequence
  Synthetic Construct
MDVFMKGLSKAKEGVVAAAEKTKQGVAEAAGKTKEGVLYVGSKTKEGVVHGVATVAEKTKEQVTNVGGAVVTGVTAVNQKTVEGAGSIAAATGFVKKDQLGKNEEGAPQEGILEDMPVDPDNEAYEMPSEEGYQDYEPEA

SEQ ID NO: 458 - protein, 140 aa, Artificial Sequence
  Synthetic Construct
MDVFMKGLSKAKEGVVAAAEKTKQGVAEAAGKTKEGVLYVGSKTKEGVVHGVATVAEKTKEQVTNVGGAVVTGVTAVQQKTVEGAGSIAAATGFVKKDQLGKNEEGAPQEGILEDMPVDPDNEAYEMPSEEGYQDYEPEA

SEQ ID NO: 459 - protein, 140 aa, Artificial Sequence
  Synthetic Construct
MDVFMKGLSKAKEGVVAAAEKTKQGVAEAAGKTKEGVLYVGSKTKEGVVHGVATVAEKTKEQVTNVGGAVVTGVTAVCQKTVEGAGSIAAATGFVKKDQLGKNEEGAPQEGILEDMPVDPDNEAYEMPSEEGYQDYEPEA

SEQ ID NO: 460 - protein, 140 aa, Artificial Sequence
  Synthetic Construct
MDVFMKGLSKAKEGVVAAAEKTKQGVAEAAGKTKEGVLYVGSKTKEGVVHGVATVAEKTKEQVTNVGGAVVTGVTAVAPKTVEGAGSIAAATGFVKKDQLGKNEEGAPQEGILEDMPVDPDNEAYEMPSEEGYQDYEPEA

SEQ ID NO: 461 - protein, 140 aa, Artificial Sequence
  Synthetic Construct
MDVFMKGLSKAKEGVVAAAEKTKQGVAEAAGKTKEGVLYVGSKTKEGVVHGVATVAEKTKEQVTNVGGAVVTGVTAVAGKTVEGAGSIAAATGFVKKDQLGKNEEGAPQEGILEDMPVDPDNEAYEMPSEEGYQDYEPEA

SEQ ID NO: 462 - protein, 140 aa, Artificial Sequence
  Synthetic Construct
MDVFMKGLSKAKEGVVAAAEKTKQGVAEAAGKTKEGVLYVGSKTKEGVVHGVATVAEKTKEQVTNVGGAVVTGVTAVAKKTVEGAGSIAAATGFVKKDQLGKNEEGAPQEGILEDMPVDPDNEAYEMPSEEGYQDYEPEA

SEQ ID NO: 463 - protein, 140 aa, Artificial Sequence
  Synthetic Construct
MDVFMKGLSKAKEGVVAAAEKTKQGVAEAAGKTKEGVLYVGSKTKEGVVHGVATVAEKTKEQVTNVGGAVVTGVTAVARKTVEGAGSIAAATGFVKKDQLGKNEEGAPQEGILEDMPVDPDNEAYEMPSEEGYQDYEPEA

SEQ ID NO: 464 - protein, 140 aa, Artificial Sequence
  Synthetic Construct
MDVFMKGLSKAKEGVVAAAEKTKQGVAEAAGKTKEGVLYVGSKTKEGVVHGVATVAEKTKEQVTNVGGAVVTGVTAVAHKTVEGAGSIAAATGFVKKDQLGKNEEGAPQEGILEDMPVDPDNEAYEMPSEEGYQDYEPEA

SEQ ID NO: 465 - protein, 140 aa, Artificial Sequence
  Synthetic Construct
MDVFMKGLSKAKEGVVAAAEKTKQGVAEAAGKTKEGVLYVGSKTKEGVVHGVATVAEKTKEQVTNVGGAVVTGVTAVAEKTVEGAGSIAAATGFVKKDQLGKNEEGAPQEGILEDMPVDPDNEAYEMPSEEGYQDYEPEA

SEQ ID NO: 466 - protein, 140 aa, Artificial Sequence
  Synthetic Construct
MDVFMKGLSKAKEGVVAAAEKTKQGVAEAAGKTKEGVLYVGSKTKEGVVHGVATVAEKTKEQVTNVGGAVVTGVTAVADKTVEGAGSIAAATGFVKKDQLGKNEEGAPQEGILEDMPVDPDNEAYEMPSEEGYQDYEPEA

SEQ ID NO: 467 - protein, 140 aa, Artificial Sequence
  Synthetic Construct
MDVFMKGLSKAKEGVVAAAEKTKQGVAEAAGKTKEGVLYVGSKTKEGVVHGVATVAEKTKEQVTNVGGAVVTGVTAVASKTVEGAGSIAAATGFVKKDQLGKNEEGAPQEGILEDMPVDPDNEAYEMPSEEGYQDYEPEA

SEQ ID NO: 468 - protein, 140 aa, Artificial Sequence
  Synthetic Construct
MDVFMKGLSKAKEGVVAAAEKTKQGVAEAAGKTKEGVLYVGSKTKEGVVHGVATVAEKTKEQVTNVGGAVVTGVTAVATKTVEGAGSIAAATGFVKKDQLGKNEEGAPQEGILEDMPVDPDNEAYEMPSEEGYQDYEPEA

SEQ ID NO: 469 - protein, 140 aa, Artificial Sequence
  Synthetic Construct
MDVFMKGLSKAKEGVVAAAEKTKQGVAEAAGKTKEGVLYVGSKTKEGVVHGVATVAEKTKEQVTNVGGAVVTGVTAVANKTVEGAGSIAAATGFVKKDQLGKNEEGAPQEGILEDMPVDPDNEAYEMPSEEGYQDYEPEA

SEQ ID NO: 470 - protein, 140 aa, Artificial Sequence; identical to SEQ ID NO: 208
  Synthetic Construct

SEQ ID NO: 471 - protein, 140 aa, Artificial Sequence
  Synthetic Construct
MDVFMKGLSKAKEGVVAAAEKTKQGVAEAAGKTKEGVLYVGSKTKEGVVHGVATVAEKTKEQVTNVGGAVVTGVTAVACKTVEGAGSIAAATGFVKKDQLGKNEEGAPQEGILEDMPVDPDNEAYEMPSEEGYQDYEPEA

SEQ ID NO: 472 - protein, 140 aa, Artificial Sequence
  Synthetic Construct
MDVFMKGLSKAKEGVVAAAEKTKQGVAEAAGKTKEGVLYVGSKTKEGVVHGVATVAEKTKEQVTNVGGAVVTGVTAVAQPTVEGAGSIAAATGFVKKDQLGKNEEGAPQEGILEDMPVDPDNEAYEMPSEEGYQDYEPEA

SEQ ID NO: 473 - protein, 140 aa, Artificial Sequence
  Synthetic Construct
MDVFMKGLSKAKEGVVAAAEKTKQGVAEAAGKTKEGVLYVGSKTKEGVVHGVATVAEKTKEQVTNVGGAVVTGVTAVAQGTVEGAGSIAAATGFVKKDQLGKNEEGAPQEGILEDMPVDPDNEAYEMPSEEGYQDYEPEA

SEQ ID NO: 474 - protein, 140 aa, Artificial Sequence; identical to SEQ ID NO: 208
  Synthetic Construct

SEQ ID NO: 475 - protein, 140 aa, Artificial Sequence
  Synthetic Construct
MDVFMKGLSKAKEGVVAAAEKTKQGVAEAAGKTKEGVLYVGSKTKEGVVHGVATVAEKTKEQVTNVGGAVVTGVTAVAQRTVEGAGSIAAATGFVKKDQLGKNEEGAPQEGILEDMPVDPDNEAYEMPSEEGYQDYEPEA

SEQ ID NO: 476 - protein, 140 aa, Artificial Sequence
  Synthetic Construct
MDVFMKGLSKAKEGVVAAAEKTKQGVAEAAGKTKEGVLYVGSKTKEGVVHGVATVAEKTKEQVTNVGGAVVTGVTAVAQHTVEGAGSIAAATGFVKKDQLGKNEEGAPQEGILEDMPVDPDNEAYEMPSEEGYQDYEPEA

SEQ ID NO: 477 - protein, 140 aa, Artificial Sequence
  Synthetic Construct
MDVFMKGLSKAKEGVVAAAEKTKQGVAEAAGKTKEGVLYVGSKTKEGVVHGVATVAEKTKEQVTNVGGAVVTGVTAVAQETVEGAGSIAAATGFVKKDQLGKNEEGAPQEGILEDMPVDPDNEAYEMPSEEGYQDYEPEA

SEQ ID NO: 478 - protein, 140 aa, Artificial Sequence
  Synthetic Construct
MDVFMKGLSKAKEGVVAAAEKTKQGVAEAAGKTKEGVLYVGSKTKEGVVHGVATVAEKTKEQVTNVGGAVVTGVTAVAQDTVEGAGSIAAATGFVKKDQLGKNEEGAPQEGILEDMPVDPDNEAYEMPSEEGYQDYEPEA

SEQ ID NO: 479 - protein, 140 aa, Artificial Sequence
  Synthetic Construct
MDVFMKGLSKAKEGVVAAAEKTKQGVAEAAGKTKEGVLYVGSKTKEGVVHGVATVAEKTKEQVTNVGGAVVTGVTAVAQSTVEGAGSIAAATGFVKKDQLGKNEEGAPQEGILEDMPVDPDNEAYEMPSEEGYQDYEPEA

SEQ ID NO: 480 - protein, 140 aa, Artificial Sequence
  Synthetic Construct
MDVFMKGLSKAKEGVVAAAEKTKQGVAEAAGKTKEGVLYVGSKTKEGVVHGVATVAEKTKEQVTNVGGAVVTGVTAVAQTTVEGAGSIAAATGFVKKDQLGKNEEGAPQEGILEDMPVDPDNEAYEMPSEEGYQDYEPEA

SEQ ID NO: 481 - protein, 140 aa, Artificial Sequence
  Synthetic Construct
MDVFMKGLSKAKEGVVAAAEKTKQGVAEAAGKTKEGVLYVGSKTKEGVVHGVATVAEKTKEQVTNVGGAVVTGVTAVAQNTVEGAGSIAAATGFVKKDQLGKNEEGAPQEGILEDMPVDPDNEAYEMPSEEGYQDYEPEA

SEQ ID NO: 482 - protein, 140 aa, Artificial Sequence
  Synthetic Construct
MDVFMKGLSKAKEGVVAAAEKTKQGVAEAAGKTKEGVLYVGSKTKEGVVHGVATVAEKTKEQVTNVGGAVVTGVTAVAQQTVEGAGSIAAATGFVKKDQLGKNEEGAPQEGILEDMPVDPDNEAYEMPSEEGYQDYEPEA

SEQ ID NO: 483 - protein, 140 aa, Artificial Sequence
  Synthetic Construct
MDVFMKGLSKAKEGVVAAAEKTKQGVAEAAGKTKEGVLYVGSKTKEGVVHGVATVAEKTKEQVTNVGGAVVTGVTAVAQCTVEGAGSIAAATGFVKKDQLGKNEEGAPQEGILEDMPVDPDNEAYEMPSEEGYQDYEPEA

SEQ ID NO: 484 - protein, 140 aa, Artificial Sequence
  Synthetic Construct
MDVFMKGLSKAKEGVVAAAEKTKQGVAEAAGKTKEGVLYVGSKTKEGVVHGVATVAEKTKEQVTNVGGAVVTGVTAVAQKPVEGAGSIAAATGFVKKDQLGKNEEGAPQEGILEDMPVDPDNEAYEMPSEEGYQDYEPEA

SEQ ID NO: 485 - protein, 140 aa, Artificial Sequence
  Synthetic Construct
MDVFMKGLSKAKEGVVAAAEKTKQGVAEAAGKTKEGVLYVGSKTKEGVVHGVATVAEKTKEQVTNVGGAVVTGVTAVAQKGVEGAGSIAAATGFVKKDQLGKNEEGAPQEGILEDMPVDPDNEAYEMPSEEGYQDYEPEA

SEQ ID NO: 486 - protein, 140 aa, Artificial Sequence
  Synthetic Construct
MDVFMKGLSKAKEGVVAAAEKTKQGVAEAAGKTKEGVLYVGSKTKEGVVHGVATVAEKTKEQVTNVGGAVVTGVTAVAQKKVEGAGSIAAATGFVKKDQLGKNEEGAPQEGILEDMPVDPDNEAYEMPSEEGYQDYEPEA

SEQ ID NO: 487 - protein, 140 aa, Artificial Sequence
  Synthetic Construct
MDVFMKGLSKAKEGVVAAAEKTKQGVAEAAGKTKEGVLYVGSKTKEGVVHGVATVAEKTKEQVTNVGGAVVTGVTAVAQKRVEGAGSIAAATGFVKKDQLGKNEEGAPQEGILEDMPVDPDNEAYEMPSEEGYQDYEPEA

SEQ ID NO: 488 - protein, 140 aa, Artificial Sequence
  Synthetic Construct
MDVFMKGLSKAKEGVVAAAEKTKQGVAEAAGKTKEGVLYVGSKTKEGVVHGVATVAEKTKEQVTNVGGAVVTGVTAVAQKHVEGAGSIAAATGFVKKDQLGKNEEGAPQEGILEDMPVDPDNEAYEMPSEEGYQDYEPEA

SEQ ID NO: 489 - protein, 140 aa, Artificial Sequence
  Synthetic Construct
MDVFMKGLSKAKEGVVAAAEKTKQGVAEAAGKTKEGVLYVGSKTKEGVVHGVATVAEKTKEQVTNVGGAVVTGVTAVAQKEVEGAGSIAAATGFVKKDQLGKNEEGAPQEGILEDMPVDPDNEAYEMPSEEGYQDYEPEA

SEQ ID NO: 490 - protein, 140 aa, Artificial Sequence
  Synthetic Construct
MDVFMKGLSKAKEGVVAAAEKTKQGVAEAAGKTKEGVLYVGSKTKEGVVHGVATVAEKTKEQVTNVGGAVVTGVTAVAQKDVEGAGSIAAATGFVKKDQLGKNEEGAPQEGILEDMPVDPDNEAYEMPSEEGYQDYEPEA

SEQ ID NO: 491 - protein, 140 aa, Artificial Sequence
  Synthetic Construct
MDVFMKGLSKAKEGVVAAAEKTKQGVAEAAGKTKEGVLYVGSKTKEGVVHGVATVAEKTKEQVTNVGGAVVTGVTAVAQKSVEGAGSIAAATGFVKKDQLGKNEEGAPQEGILEDMPVDPDNEAYEMPSEEGYQDYEPEA

SEQ ID NO: 492 - protein, 140 aa, Artificial Sequence; identical to SEQ ID NO: 208
  Synthetic Construct

SEQ ID NO: 493 - protein, 140 aa, Artificial Sequence
  Synthetic Construct
MDVFMKGLSKAKEGVVAAAEKTKQGVAEAAGKTKEGVLYVGSKTKEGVVHGVATVAEKTKEQVTNVGGAVVTGVTAVAQKNVEGAGSIAAATGFVKKDQLGKNEEGAPQEGILEDMPVDPDNEAYEMPSEEGYQDYEPEA

SEQ ID NO: 494 - protein, 140 aa, Artificial Sequence
  Synthetic Construct
MDVFMKGLSKAKEGVVAAAEKTKQGVAEAAGKTKEGVLYVGSKTKEGVVHGVATVAEKTKEQVTNVGGAVVTGVTAVAQKQVEGAGSIAAATGFVKKDQLGKNEEGAPQEGILEDMPVDPDNEAYEMPSEEGYQDYEPEA

SEQ ID NO: 495 - protein, 140 aa, Artificial Sequence
  Synthetic Construct
MDVFMKGLSKAKEGVVAAAEKTKQGVAEAAGKTKEGVLYVGSKTKEGVVHGVATVAEKTKEQVTNVGGAVVTGVTAVAQKCVEGAGSIAAATGFVKKDQLGKNEEGAPQEGILEDMPVDPDNEAYEMPSEEGYQDYEPEA

SEQ ID NO: 496 - protein, 140 aa, Artificial Sequence
  Synthetic Construct
MDVFMKGLSKAKEGVVAAAEKTKQGVAEAAGKTKEGVLYVGSKTKEGVVHGVATVAEKTKEQVTNVGGAVVTGVTAVAQKTPEGAGSIAAATGFVKKDQLGKNEEGAPQEGILEDMPVDPDNEAYEMPSEEGYQDYEPEA

SEQ ID NO: 497 - protein, 140 aa, Artificial Sequence
  Synthetic Construct
MDVFMKGLSKAKEGVVAAAEKTKQGVAEAAGKTKEGVLYVGSKTKEGVVHGVATVAEKTKEQVTNVGGAVVTGVTAVAQKTGEGAGSIAAATGFVKKDQLGKNEEGAPQEGILEDMPVDPDNEAYEMPSEEGYQDYEPEA

SEQ ID NO: 498 - protein, 140 aa, Artificial Sequence
  Synthetic Construct
MDVFMKGLSKAKEGVVAAAEKTKQGVAEAAGKTKEGVLYVGSKTKEGVVHGVATVAEKTKEQVTNVGGAVVTGVTAVAQKTKEGAGSIAAATGFVKKDQLGKNEEGAPQEGILEDMPVDPDNEAYEMPSEEGYQDYEPEA

SEQ ID NO: 499 - protein, 140 aa, Artificial Sequence
  Synthetic Construct
MDVFMKGLSKAKEGVVAAAEKTKQGVAEAAGKTKEGVLYVGSKTKEGVVHGVATVAEKTKEQVTNVGGAVVTGVTAVAQKTREGAGSIAAATGFVKKDQLGKNEEGAPQEGILEDMPVDPDNEAYEMPSEEGYQDYEPEA

SEQ ID NO: 500 - protein, 140 aa, Artificial Sequence
  Synthetic Construct
MDVFMKGLSKAKEGVVAAAEKTKQGVAEAAGKTKEGVLYVGSKTKEGVVHGVATVAEKTKEQVTNVGGAVVTGVTAVAQKTHEGAGSIAAATGFVKKDQLGKNEEGAPQEGILEDMPVDPDNEAYEMPSEEGYQDYEPEA

SEQ ID NO: 501 - protein, 140 aa, Artificial Sequence
  Synthetic Construct
MDVFMKGLSKAKEGVVAAAEKTKQGVAEAAGKTKEGVLYVGSKTKEGVVHGVATVAEKTKEQVTNVGGAVVTGVTAVAQKTEEGAGSIAAATGFVKKDQLGKNEEGAPQEGILEDMPVDPDNEAYEMPSEEGYQDYEPEA

SEQ ID NO: 502 - protein, 140 aa, Artificial Sequence
  Synthetic Construct
MDVFMKGLSKAKEGVVAAAEKTKQGVAEAAGKTKEGVLYVGSKTKEGVVHGVATVAEKTKEQVTNVGGAVVTGVTAVAQKTDEGAGSIAAATGFVKKDQLGKNEEGAPQEGILEDMPVDPDNEAYEMPSEEGYQDYEPEA

SEQ ID NO: 503 - protein, 140 aa, Artificial Sequence
  Synthetic Construct
MDVFMKGLSKAKEGVVAAAEKTKQGVAEAAGKTKEGVLYVGSKTKEGVVHGVATVAEKTKEQVTNVGGAVVTGVTAVAQKTSEGAGSIAAATGFVKKDQLGKNEEGAPQEGILEDMPVDPDNEAYEMPSEEGYQDYEPEA

SEQ ID NO: 504 - protein, 140 aa, Artificial Sequence
  Synthetic Construct
MDVFMKGLSKAKEGVVAAAEKTKQGVAEAAGKTKEGVLYVGSKTKEGVVHGVATVAEKTKEQVTNVGGAVVTGVTAVAQKTTEGAGSIAAATGFVKKDQLGKNEEGAPQEGILEDMPVDPDNEAYEMPSEEGYQDYEPEA

SEQ ID NO: 505 - protein, 140 aa, Artificial Sequence
  Synthetic Construct
MDVFMKGLSKAKEGVVAAAEKTKQGVAEAAGKTKEGVLYVGSKTKEGVVHGVATVAEKTKEQVTNVGGAVVTGVTAVAQKTNEGAGSIAAATGFVKKDQLGKNEEGAPQEGILEDMPVDPDNEAYEMPSEEGYQDYEPEA

SEQ ID NO: 506 - protein, 140 aa, Artificial Sequence
  Synthetic Construct
MDVFMKGLSKAKEGVVAAAEKTKQGVAEAAGKTKEGVLYVGSKTKEGVVHGVATVAEKTKEQVTNVGGAVVTGVTAVAQKTQEGAGSIAAATGFVKKDQLGKNEEGAPQEGILEDMPVDPDNEAYEMPSEEGYQDYEPEA

SEQ ID NO: 507 - protein, 140 aa, Artificial Sequence
  Synthetic Construct
MDVFMKGLSKAKEGVVAAAEKTKQGVAEAAGKTKEGVLYVGSKTKEGVVHGVATVAEKTKEQVTNVGGAVVTGVTAVAQKTCEGAGSIAAATGFVKKDQLGKNEEGAPQEGILEDMPVDPDNEAYEMPSEEGYQDYEPEA

SEQ ID NO: 508 - protein, 140 aa, Artificial Sequence
  Synthetic Construct
MDVFMKGLSKAKEGVVAAAEKTKQGVAEAAGKTKEGVLYVGSKTKEGVVHGVATVAEKTKEQVTNVGGAVVTGVTAVAQKTVPGAGSIAAATGFVKKDQLGKNEEGAPQEGILEDMPVDPDNEAYEMPSEEGYQDYEPEA

SEQ ID NO: 509 - protein, 140 aa, Artificial Sequence
  Synthetic Construct
MDVFMKGLSKAKEGVVAAAEKTKQGVAEAAGKTKEGVLYVGSKTKEGVVHGVATVAEKTKEQVTNVGGAVVTGVTAVAQKTVGGAGSIAAATGFVKKDQLGKNEEGAPQEGILEDMPVDPDNEAYEMPSEEGYQDYEPEA

SEQ ID NO: 510 - protein, 140 aa, Artificial Sequence
  Synthetic Construct
MDVFMKGLSKAKEGVVAAAEKTKQGVAEAAGKTKEGVLYVGSKTKEGVVHGVATVAEKTKEQVTNVGGAVVTGVTAVAQKTVKGAGSIAAATGFVKKDQLGKNEEGAPQEGILEDMPVDPDNEAYEMPSEEGYQDYEPEA

SEQ ID NO: 511 - protein, 140 aa, Artificial Sequence
  Synthetic Construct
MDVFMKGLSKAKEGVVAAAEKTKQGVAEAAGKTKEGVLYVGSKTKEGVVHGVATVAEKTKEQVTNVGGAVVTGVTAVAQKTVRGAGSIAAATGFVKKDQLGKNEEGAPQEGILEDMPVDPDNEAYEMPSEEGYQDYEPEA

SEQ ID NO: 512 - protein, 140 aa, Artificial Sequence
  Synthetic Construct
MDVFMKGLSKAKEGVVAAAEKTKQGVAEAAGKTKEGVLYVGSKTKEGVVHGVATVAEKTKEQVTNVGGAVVTGVTAVAQKTVHGAGSIAAATGFVKKDQLGKNEEGAPQEGILEDMPVDPDNEAYEMPSEEGYQDYEPEA

SEQ ID NO: 513 - protein, 140 aa, Artificial Sequence; identical to SEQ ID NO: 208
  Synthetic Construct

SEQ ID NO: 514 - protein, 140 aa, Artificial Sequence
  Synthetic Construct
MDVFMKGLSKAKEGVVAAAEKTKQGVAEAAGKTKEGVLYVGSKTKEGVVHGVATVAEKTKEQVTNVGGAVVTGVTAVAQKTVDGAGSIAAATGFVKKDQLGKNEEGAPQEGILEDMPVDPDNEAYEMPSEEGYQDYEPEA

SEQ ID NO: 515 - protein, 140 aa, Artificial Sequence
  Synthetic Construct
MDVFMKGLSKAKEGVVAAAEKTKQGVAEAAGKTKEGVLYVGSKTKEGVVHGVATVAEKTKEQVTNVGGAVVTGVTAVAQKTVSGAGSIAAATGFVKKDQLGKNEEGAPQEGILEDMPVDPDNEAYEMPSEEGYQDYEPEA

SEQ ID NO: 516 - protein, 140 aa, Artificial Sequence
  Synthetic Construct
MDVFMKGLSKAKEGVVAAAEKTKQGVAEAAGKTKEGVLYVGSKTKEGVVHGVATVAEKTKEQVTNVGGAVVTGVTAVAQKTVTGAGSIAAATGFVKKDQLGKNEEGAPQEGILEDMPVDPDNEAYEMPSEEGYQDYEPEA

SEQ ID NO: 517 - protein, 140 aa, Artificial Sequence
  Synthetic Construct
MDVFMKGLSKAKEGVVAAAEKTKQGVAEAAGKTKEGVLYVGSKTKEGVVHGVATVAEKTKEQVTNVGGAVVTGVTAVAQKTVNGAGSIAAATGFVKKDQLGKNEEGAPQEGILEDMPVDPDNEAYEMPSEEGYQDYEPEA

SEQ ID NO: 518 - protein, 140 aa, Artificial Sequence
  Synthetic Construct
MDVFMKGLSKAKEGVVAAAEKTKQGVAEAAGKTKEGVLYVGSKTKEGVVHGVATVAEKTKEQVTNVGGAVVTGVTAVAQKTVQGAGSIAAATGFVKKDQLGKNEEGAPQEGILEDMPVDPDNEAYEMPSEEGYQDYEPEA

SEQ ID NO: 519 - protein, 140 aa, Artificial Sequence
  Synthetic Construct
MDVFMKGLSKAKEGVVAAAEKTKQGVAEAAGKTKEGVLYVGSKTKEGVVHGVATVAEKTKEQVTNVGGAVVTGVTAVAQKTVCGAGSIAAATGFVKKDQLGKNEEGAPQEGILEDMPVDPDNEAYEMPSEEGYQDYEPEA

SEQ ID NO: 520 - protein, 140 aa, Artificial Sequence
  Synthetic Construct
MDVFMKGLSKAKEGVVAAAEKTKQGVAEAAGKTKEGVLYVGSKTKEGVVHGVATVAEKTKEQVTNVGGAVVTGVTAVAQKTVEPAGSIAAATGFVKKDQLGKNEEGAPQEGILEDMPVDPDNEAYEMPSEEGYQDYEPEA

SEQ ID NO: 521 - protein, 140 aa, Artificial Sequence; identical to SEQ ID NO: 208
  Synthetic Construct

SEQ ID NO: 522 - protein, 140 aa, Artificial Sequence
  Synthetic Construct
MDVFMKGLSKAKEGVVAAAEKTKQGVAEAAGKTKEGVLYVGSKTKEGVVHGVATVAEKTKEQVTNVGGAVVTGVTAVAQKTVEKAGSIAAATGFVKKDQLGKNEEGAPQEGILEDMPVDPDNEAYEMPSEEGYQDYEPEA

SEQ ID NO: 523 - protein, 140 aa, Artificial Sequence
  Synthetic Construct
MDVFMKGLSKAKEGVVAAAEKTKQGVAEAAGKTKEGVLYVGSKTKEGVVHGVATVAEKTKEQVTNVGGAVVTGVTAVAQKTVERAGSIAAATGFVKKDQLGKNEEGAPQEGILEDMPVDPDNEAYEMPSEEGYQDYEPEA

SEQ ID NO: 524 - protein, 140 aa, Artificial Sequence
  Synthetic Construct
MDVFMKGLSKAKEGVVAAAEKTKQGVAEAAGKTKEGVLYVGSKTKEGVVHGVATVAEKTKEQVTNVGGAVVTGVTAVAQKTVEHAGSIAAATGFVKKDQLGKNEEGAPQEGILEDMPVDPDNEAYEMPSEEGYQDYEPEA

SEQ ID NO: 525 - protein, 140 aa, Artificial Sequence
  Synthetic Construct
MDVFMKGLSKAKEGVVAAAEKTKQGVAEAAGKTKEGVLYVGSKTKEGVVHGVATVAEKTKEQVTNVGGAVVTGVTAVAQKTVEEAGSIAAATGFVKKDQLGKNEEGAPQEGILEDMPVDPDNEAYEMPSEEGYQDYEPEA

SEQ ID NO: 526 - protein, 140 aa, Artificial Sequence
  Synthetic Construct
MDVFMKGLSKAKEGVVAAAEKTKQGVAEAAGKTKEGVLYVGSKTKEGVVHGVATVAEKTKEQVTNVGGAVVTGVTAVAQKTVEDAGSIAAATGFVKKDQLGKNEEGAPQEGILEDMPVDPDNEAYEMPSEEGYQDYEPEA

SEQ ID NO: 527 - protein, 140 aa, Artificial Sequence
  Synthetic Construct
MDVFMKGLSKAKEGVVAAAEKTKQGVAEAAGKTKEGVLYVGSKTKEGVVHGVATVAEKTKEQVTNVGGAVVTGVTAVAQKTVESAGSIAAATGFVKKDQLGKNEEGAPQEGILEDMPVDPDNEAYEMPSEEGYQDYEPEA

SEQ ID NO: 528 - protein, 140 aa, Artificial Sequence
  Synthetic Construct
MDVFMKGLSKAKEGVVAAAEKTKQGVAEAAGKTKEGVLYVGSKTKEGVVHGVATVAEKTKEQVTNVGGAVVTGVTAVAQKTVETAGSIAAATGFVKKDQLGKNEEGAPQEGILEDMPVDPDNEAYEMPSEEGYQDYEPEA

SEQ ID NO: 529 - protein, 140 aa, Artificial Sequence
  Synthetic Construct
MDVFMKGLSKAKEGVVAAAEKTKQGVAEAAGKTKEGVLYVGSKTKEGVVHGVATVAEKTKEQVTNVGGAVVTGVTAVAQKTVENAGSIAAATGFVKKDQLGKNEEGAPQEGILEDMPVDPDNEAYEMPSEEGYQDYEPEA

SEQ ID NO: 530 - protein, 140 aa, Artificial Sequence
  Synthetic Construct
MDVFMKGLSKAKEGVVAAAEKTKQGVAEAAGKTKEGVLYVGSKTKEGVVHGVATVAEKTKEQVTNVGGAVVTGVTAVAQKTVEQAGSIAAATGFVKKDQLGKNEEGAPQEGILEDMPVDPDNEAYEMPSEEGYQDYEPEA

SEQ ID NO: 531 - protein, 140 aa, Artificial Sequence
  Synthetic Construct
MDVFMKGLSKAKEGVVAAAEKTKQGVAEAAGKTKEGVLYVGSKTKEGVVHGVATVAEKTKEQVTNVGGAVVTGVTAVAQKTVECAGSIAAATGFVKKDQLGKNEEGAPQEGILEDMPVDPDNEAYEMPSEEGYQDYEPEA

SEQ ID NO: 532 - protein, 140 aa, Artificial Sequence
  Synthetic Construct
MDVFMKGLSKAKEGVVAAAEKTKQGVAEAAGKTKEGVLYVGSKTKEGVVHGVATVAEKTKEQVTNVGGAVVTGVTAVAQKTVEGPGSIAAATGFVKKDQLGKNEEGAPQEGILEDMPVDPDNEAYEMPSEEGYQDYEPEA

SEQ ID NO: 533 - protein, 140 aa, Artificial Sequence
  Synthetic Construct
MDVFMKGLSKAKEGVVAAAEKTKQGVAEAAGKTKEGVLYVGSKTKEGVVHGVATVAEKTKEQVTNVGGAVVTGVTAVAQKTVEGGGSIAAATGFVKKDQLGKNEEGAPQEGILEDMPVDPDNEAYEMPSEEGYQDYEPEA

SEQ ID NO: 534 - protein, 140 aa, Artificial Sequence
  Synthetic Construct
MDVFMKGLSKAKEGVVAAAEKTKQGVAEAAGKTKEGVLYVGSKTKEGVVHGVATVAEKTKEQVTNVGGAVVTGVTAVAQKTVEGKGSIAAATGFVKKDQLGKNEEGAPQEGILEDMPVDPDNEAYEMPSEEGYQDYEPEA

SEQ ID NO: 535 - protein, 140 aa, Artificial Sequence
  Synthetic Construct
MDVFMKGLSKAKEGVVAAAEKTKQGVAEAAGKTKEGVLYVGSKTKEGVVHGVATVAEKTKEQVTNVGGAVVTGVTAVAQKTVEGRGSIAAATGFVKKDQLGKNEEGAPQEGILEDMPVDPDNEAYEMPSEEGYQDYEPEA

SEQ ID NO: 536 - protein, 140 aa, Artificial Sequence
  Synthetic Construct
MDVFMKGLSKAKEGVVAAAEKTKQGVAEAAGKTKEGVLYVGSKTKEGVVHGVATVAEKTKEQVTNVGGAVVTGVTAVAQKTVEGHGSIAAATGFVKKDQLGKNEEGAPQEGILEDMPVDPDNEAYEMPSEEGYQDYEPEA

SEQ ID NO: 537 - protein, 140 aa, Artificial Sequence
  Synthetic Construct
MDVFMKGLSKAKEGVVAAAEKTKQGVAEAAGKTKEGVLYVGSKTKEGVVHGVATVAEKTKEQVTNVGGAVVTGVTAVAQKTVEGEGSIAAATGFVKKDQLGKNEEGAPQEGILEDMPVDPDNEAYEMPSEEGYQDYEPEA

SEQ ID NO: 538 - protein, 140 aa, Artificial Sequence
  Synthetic Construct
MDVFMKGLSKAKEGVVAAAEKTKQGVAEAAGKTKEGVLYVGSKTKEGVVHGVATVAEKTKEQVTNVGGAVVTGVTAVAQKTVEGDGSIAAATGFVKKDQLGKNEEGAPQEGILEDMPVDPDNEAYEMPSEEGYQDYEPEA

SEQ ID NO: 539 - protein, 140 aa, Artificial Sequence
  Synthetic Construct
MDVFMKGLSKAKEGVVAAAEKTKQGVAEAAGKTKEGVLYVGSKTKEGVVHGVATVAEKTKEQVTNVGGAVVTGVTAVAQKTVEGSGSIAAATGFVKKDQLGKNEEGAPQEGILEDMPVDPDNEAYEMPSEEGYQDYEPEA

SEQ ID NO: 540 - protein, 140 aa, Artificial Sequence
  Synthetic Construct
MDVFMKGLSKAKEGVVAAAEKTKQGVAEAAGKTKEGVLYVGSKTKEGVVHGVATVAEKTKEQVTNVGGAVVTGVTAVAQKTVEGTGSIAAATGFVKKDQLGKNEEGAPQEGILEDMPVDPDNEAYEMPSEEGYQDYEPEA

SEQ ID NO: 541 - protein, 140 aa, Artificial Sequence
  Synthetic Construct
MDVFMKGLSKAKEGVVAAAEKTKQGVAEAAGKTKEGVLYVGSKTKEGVVHGVATVAEKTKEQVTNVGGAVVTGVTAVAQKTVEGNGSIAAATGFVKKDQLGKNEEGAPQEGILEDMPVDPDNEAYEMPSEEGYQDYEPEA

SEQ ID NO: 542 - protein, 140 aa, Artificial Sequence
  Synthetic Construct
MDVFMKGLSKAKEGVVAAAEKTKQGVAEAAGKTKEGVLYVGSKTKEGVVHGVATVAEKTKEQVTNVGGAVVTGVTAVAQKTVEGQGSIAAATGFVKKDQLGKNEEGAPQEGILEDMPVDPDNEAYEMPSEEGYQDYEPEA

SEQ ID NO: 543 - protein, 140 aa, Artificial Sequence
  Synthetic Construct
MDVFMKGLSKAKEGVVAAAEKTKQGVAEAAGKTKEGVLYVGSKTKEGVVHGVATVAEKTKEQVTNVGGAVVTGVTAVAQKTVEGCGSIAAATGFVKKDQLGKNEEGAPQEGILEDMPVDPDNEAYEMPSEEGYQDYEPEA

SEQ ID NO: 544 - protein, 140 aa, Artificial Sequence
  Synthetic Construct
MDVFMKGLSKAKEGVVAAAEKTKQGVAEAAGKTKEGVLYVGSKTKEGVVHGVATVAEKTKEQVTNVGGAVVTGVTAVAQKTVEGAPSIAAATGFVKKDQLGKNEEGAPQEGILEDMPVDPDNEAYEMPSEEGYQDYEPEA

SEQ ID NO: 545 - protein, 140 aa, Artificial Sequence; identical to SEQ ID NO: 208
  Synthetic Construct

SEQ ID NO: 546 - protein, 140 aa, Artificial Sequence
  Synthetic Construct
MDVFMKGLSKAKEGVVAAAEKTKQGVAEAAGKTKEGVLYVGSKTKEGVVHGVATVAEKTKEQVTNVGGAVVTGVTAVAQKTVEGAKSIAAATGFVKKDQLGKNEEGAPQEGILEDMPVDPDNEAYEMPSEEGYQDYEPEA

SEQ ID NO: 547 - protein, 140 aa, Artificial Sequence
  Synthetic Construct
MDVFMKGLSKAKEGVVAAAEKTKQGVAEAAGKTKEGVLYVGSKTKEGVVHGVATVAEKTKEQVTNVGGAVVTGVTAVAQKTVEGARSIAAATGFVKKDQLGKNEEGAPQEGILEDMPVDPDNEAYEMPSEEGYQDYEPEA

SEQ ID NO: 548 - protein, 140 aa, Artificial Sequence
  Synthetic Construct
MDVFMKGLSKAKEGVVAAAEKTKQGVAEAAGKTKEGVLYVGSKTKEGVVHGVATVAEKTKEQVTNVGGAVVTGVTAVAQKTVEGAHSIAAATGFVKKDQLGKNEEGAPQEGILEDMPVDPDNEAYEMPSEEGYQDYEPEA

SEQ ID NO: 549 - protein, 140 aa, Artificial Sequence
  Synthetic Construct
MDVFMKGLSKAKEGVVAAAEKTKQGVAEAAGKTKEGVLYVGSKTKEGVVHGVATVAEKTKEQVTNVGGAVVTGVTAVAQKTVEGAESIAAATGFVKKDQLGKNEEGAPQEGILEDMPVDPDNEAYEMPSEEGYQDYEPEA

SEQ ID NO: 550 - protein, 140 aa, Artificial Sequence
  Synthetic Construct
MDVFMKGLSKAKEGVVAAAEKTKQGVAEAAGKTKEGVLYVGSKTKEGVVHGVATVAEKTKEQVTNVGGAVVTGVTAVAQKTVEGADSIAAATGFVKKDQLGKNEEGAPQEGILEDMPVDPDNEAYEMPSEEGYQDYEPEA

SEQ ID NO: 551 - protein, 140 aa, Artificial Sequence
  Synthetic Construct
MDVFMKGLSKAKEGVVAAAEKTKQGVAEAAGKTKEGVLYVGSKTKEGVVHGVATVAEKTKEQVTNVGGAVVTGVTAVAQKTVEGASSIAAATGFVKKDQLGKNEEGAPQEGILEDMPVDPDNEAYEMPSEEGYQDYEPEA

SEQ ID NO: 552 - protein, 140 aa, Artificial Sequence
  Synthetic Construct
MDVFMKGLSKAKEGVVAAAEKTKQGVAEAAGKTKEGVLYVGSKTKEGVVHGVATVAEKTKEQVTNVGGAVVTGVTAVAQKTVEGATSIAAATGFVKKDQLGKNEEGAPQEGILEDMPVDPDNEAYEMPSEEGYQDYEPEA

SEQ ID NO: 553 - protein, 140 aa, Artificial Sequence
  Synthetic Construct
MDVFMKGLSKAKEGVVAAAEKTKQGVAEAAGKTKEGVLYVGSKTKEGVVHGVATVAEKTKEQVTNVGGAVVTGVTAVAQKTVEGANSIAAATGFVKKDQLGKNEEGAPQEGILEDMPVDPDNEAYEMPSEEGYQDYEPEA

SEQ ID NO: 554 - protein, 140 aa, Artificial Sequence
  Synthetic Construct
MDVFMKGLSKAKEGVVAAAEKTKQGVAEAAGKTKEGVLYVGSKTKEGVVHGVATVAEKTKEQVTNVGGAVVTGVTAVAQKTVEGAQSIAAATGFVKKDQLGKNEEGAPQEGILEDMPVDPDNEAYEMPSEEGYQDYEPEA

SEQ ID NO: 555 - protein, 140 aa, Artificial Sequence
  Synthetic Construct
MDVFMKGLSKAKEGVVAAAEKTKQGVAEAAGKTKEGVLYVGSKTKEGVVHGVATVAEKTKEQVTNVGGAVVTGVTAVAQKTVEGACSIAAATGFVKKDQLGKNEEGAPQEGILEDMPVDPDNEAYEMPSEEGYQDYEPEA

SEQ ID NO: 556 - protein, 140 aa, Artificial Sequence
  Synthetic Construct
MDVFMKGLSKAKEGVVAAAEKTKQGVAEAAGKTKEGVLYVGSKTKEGVVHGVATVAEKTKEQVTNVGGAVVTGVTAVAQKTVEGAGPIAAATGFVKKDQLGKNEEGAPQEGILEDMPVDPDNEAYEMPSEEGYQDYEPEA

SEQ ID NO: 557 - protein, 140 aa, Artificial Sequence
  Synthetic Construct
MDVFMKGLSKAKEGVVAAAEKTKQGVAEAAGKTKEGVLYVGSKTKEGVVHGVATVAEKTKEQVTNVGGAVVTGVTAVAQKTVEGAGGIAAATGFVKKDQLGKNEEGAPQEGILEDMPVDPDNEAYEMPSEEGYQDYEPEA

SEQ ID NO: 558 - protein, 140 aa, Artificial Sequence
  Synthetic Construct
MDVFMKGLSKAKEGVVAAAEKTKQGVAEAAGKTKEGVLYVGSKTKEGVVHGVATVAEKTKEQVTNVGGAVVTGVTAVAQKTVEGAGKIAAATGFVKKDQLGKNEEGAPQEGILEDMPVDPDNEAYEMPSEEGYQDYEPEA

SEQ ID NO: 559 - protein, 140 aa, Artificial Sequence
  Synthetic Construct
MDVFMKGLSKAKEGVVAAAEKTKQGVAEAAGKTKEGVLYVGSKTKEGVVHGVATVAEKTKEQVTNVGGAVVTGVTAVAQKTVEGAGRIAAATGFVKKDQLGKNEEGAPQEGILEDMPVDPDNEAYEMPSEEGYQDYEPEA

SEQ ID NO: 560 - protein, 140 aa, Artificial Sequence
  Synthetic Construct
MDVFMKGLSKAKEGVVAAAEKTKQGVAEAAGKTKEGVLYVGSKTKEGVVHGVATVAEKTKEQVTNVGGAVVTGVTAVAQKTVEGAGHIAAATGFVKKDQLGKNEEGAPQEGILEDMPVDPDNEAYEMPSEEGYQDYEPEA

SEQ ID NO: 561 - protein, 140 aa, Artificial Sequence
  Synthetic Construct
MDVFMKGLSKAKEGVVAAAEKTKQGVAEAAGKTKEGVLYVGSKTKEGVVHGVATVAEKTKEQVTNVGGAVVTGVTAVAQKTVEGAGEIAAATGFVKKDQLGKNEEGAPQEGILEDMPVDPDNEAYEMPSEEGYQDYEPEA

SEQ ID NO: 562 - protein, 140 aa, Artificial Sequence
  Synthetic Construct
MDVFMKGLSKAKEGVVAAAEKTKQGVAEAAGKTKEGVLYVGSKTKEGVVHGVATVAEKTKEQVTNVGGAVVTGVTAVAQKTVEGAGDIAAATGFVKKDQLGKNEEGAPQEGILEDMPVDPDNEAYEMPSEEGYQDYEPEA

SEQ ID NO: 563 - protein, 140 aa, Artificial Sequence; identical to SEQ ID NO: 208
  Synthetic Construct

SEQ ID NO: 564 - protein, 140 aa, Artificial Sequence
  Synthetic Construct
MDVFMKGLSKAKEGVVAAAEKTKQGVAEAAGKTKEGVLYVGSKTKEGVVHGVATVAEKTKEQVTNVGGAVVTGVTAVAQKTVEGAGTIAAATGFVKKDQLGKNEEGAPQEGILEDMPVDPDNEAYEMPSEEGYQDYEPEA

SEQ ID NO: 565 - protein, 140 aa, Artificial Sequence
  Synthetic Construct
MDVFMKGLSKAKEGVVAAAEKTKQGVAEAAGKTKEGVLYVGSKTKEGVVHGVATVAEKTKEQVTNVGGAVVTGVTAVAQKTVEGAGNIAAATGFVKKDQLGKNEEGAPQEGILEDMPVDPDNEAYEMPSEEGYQDYEPEA

SEQ ID NO: 566 - protein, 140 aa, Artificial Sequence
  Synthetic Construct
MDVFMKGLSKAKEGVVAAAEKTKQGVAEAAGKTKEGVLYVGSKTKEGVVHGVATVAEKTKEQVTNVGGAVVTGVTAVAQKTVEGAGQIAAATGFVKKDQLGKNEEGAPQEGILEDMPVDPDNEAYEMPSEEGYQDYEPEA

SEQ ID NO: 567 - protein, 140 aa, Artificial Sequence
  Synthetic Construct
MDVFMKGLSKAKEGVVAAAEKTKQGVAEAAGKTKEGVLYVGSKTKEGVVHGVATVAEKTKEQVTNVGGAVVTGVTAVAQKTVEGAGCIAAATGFVKKDQLGKNEEGAPQEGILEDMPVDPDNEAYEMPSEEGYQDYEPEA

SEQ ID NO: 568 - protein, 140 aa, Artificial Sequence
  Synthetic Construct
MDVFMKGLSKAKEGVVAAAEKTKQGVAEAAGKTKEGVLYVGSKTKEGVVHGVATVAEKTKEQVTNVGGAVVTGVTAVAQKTVEGAGSPAAATGFVKKDQLGKNEEGAPQEGILEDMPVDPDNEAYEMPSEEGYQDYEPEA

SEQ ID NO: 569 - protein, 140 aa, Artificial Sequence
  Synthetic Construct
MDVFMKGLSKAKEGVVAAAEKTKQGVAEAAGKTKEGVLYVGSKTKEGVVHGVATVAEKTKEQVTNVGGAVVTGVTAVAQKTVEGAGSGAAATGFVKKDQLGKNEEGAPQEGILEDMPVDPDNEAYEMPSEEGYQDYEPEA

SEQ ID NO: 570 - protein, 140 aa, Artificial Sequence
  Synthetic Construct
MDVFMKGLSKAKEGVVAAAEKTKQGVAEAAGKTKEGVLYVGSKTKEGVVHGVATVAEKTKEQVTNVGGAVVTGVTAVAQKTVEGAGSKAAATGFVKKDQLGKNEEGAPQEGILEDMPVDPDNEAYEMPSEEGYQDYEPEA

SEQ ID NO: 571 - protein, 140 aa, Artificial Sequence
  Synthetic Construct
MDVFMKGLSKAKEGVVAAAEKTKQGVAEAAGKTKEGVLYVGSKTKEGVVHGVATVAEKTKEQVTNVGGAVVTGVTAVAQKTVEGAGSRAAATGFVKKDQLGKNEEGAPQEGILEDMPVDPDNEAYEMPSEEGYQDYEPEA

SEQ ID NO: 572 - protein, 140 aa, Artificial Sequence
  Synthetic Construct
MDVFMKGLSKAKEGVVAAAEKTKQGVAEAAGKTKEGVLYVGSKTKEGVVHGVATVAEKTKEQVTNVGGAVVTGVTAVAQKTVEGAGSHAAATGFVKKDQLGKNEEGAPQEGILEDMPVDPDNEAYEMPSEEGYQDYEPEA

SEQ ID NO: 573 - protein, 140 aa, Artificial Sequence
  Synthetic Construct
MDVFMKGLSKAKEGVVAAAEKTKQGVAEAAGKTKEGVLYVGSKTKEGVVHGVATVAEKTKEQVTNVGGAVVTGVTAVAQKTVEGAGSEAAATGFVKKDQLGKNEEGAPQEGILEDMPVDPDNEAYEMPSEEGYQDYEPEA

SEQ ID NO: 574 - protein, 140 aa, Artificial Sequence
  Synthetic Construct
MDVFMKGLSKAKEGVVAAAEKTKQGVAEAAGKTKEGVLYVGSKTKEGVVHGVATVAEKTKEQVTNVGGAVVTGVTAVAQKTVEGAGSDAAATGFVKKDQLGKNEEGAPQEGILEDMPVDPDNEAYEMPSEEGYQDYEPEA

SEQ ID NO: 575 - protein, 140 aa, Artificial Sequence
  Synthetic Construct
MDVFMKGLSKAKEGVVAAAEKTKQGVAEAAGKTKEGVLYVGSKTKEGVVHGVATVAEKTKEQVTNVGGAVVTGVTAVAQKTVEGAGSSAAATGFVKKDQLGKNEEGAPQEGILEDMPVDPDNEAYEMPSEEGYQDYEPEA

SEQ ID NO: 576 - protein, 140 aa, Artificial Sequence
  Synthetic Construct
MDVFMKGLSKAKEGVVAAAEKTKQGVAEAAGKTKEGVLYVGSKTKEGVVHGVATVAEKTKEQVTNVGGAVVTGVTAVAQKTVEGAGSTAAATGFVKKDQLGKNEEGAPQEGILEDMPVDPDNEAYEMPSEEGYQDYEPEA

SEQ ID NO: 577 - protein, 140 aa, Artificial Sequence
  Synthetic Construct
MDVFMKGLSKAKEGVVAAAEKTKQGVAEAAGKTKEGVLYVGSKTKEGVVHGVATVAEKTKEQVTNVGGAVVTGVTAVAQKTVEGAGSNAAATGFVKKDQLGKNEEGAPQEGILEDMPVDPDNEAYEMPSEEGYQDYEPEA

SEQ ID NO: 578 - protein, 140 aa, Artificial Sequence
  Synthetic Construct
MDVFMKGLSKAKEGVVAAAEKTKQGVAEAAGKTKEGVLYVGSKTKEGVVHGVATVAEKTKEQVTNVGGAVVTGVTAVAQKTVEGAGSQAAATGFVKKDQLGKNEEGAPQEGILEDMPVDPDNEAYEMPSEEGYQDYEPEA

SEQ ID NO: 579 - protein, 140 aa, Artificial Sequence
  Synthetic Construct
MDVFMKGLSKAKEGVVAAAEKTKQGVAEAAGKTKEGVLYVGSKTKEGVVHGVATVAEKTKEQVTNVGGAVVTGVTAVAQKTVEGAGSCAAATGFVKKDQLGKNEEGAPQEGILEDMPVDPDNEAYEMPSEEGYQDYEPEA

SEQ ID NO: 580 - protein, 140 aa, Artificial Sequence
  Synthetic Construct
MDVFMKGLSKAKEGVVAAAEKTKQGVAEAAGKTKEGVLYVGSKTKEGVVHGVATVAEKTKEQVTNVGGAVVTGVTAVAQKTVEGAGSIPAATGFVKKDQLGKNEEGAPQEGILEDMPVDPDNEAYEMPSEEGYQDYEPEA

SEQ ID NO: 581 - protein, 140 aa, Artificial Sequence
  Synthetic Construct
MDVFMKGLSKAKEGVVAAAEKTKQGVAEAAGKTKEGVLYVGSKTKEGVVHGVATVAEKTKEQVTNVGGAVVTGVTAVAQKTVEGAGSIGAATGFVKKDQLGKNEEGAPQEGILEDMPVDPDNEAYEMPSEEGYQDYEPEA

SEQ ID NO: 582 - protein, 140 aa, Artificial Sequence
  Synthetic Construct
MDVFMKGLSKAKEGVVAAAEKTKQGVAEAAGKTKEGVLYVGSKTKEGVVHGVATVAEKTKEQVTNVGGAVVTGVTAVAQKTVEGAGSIKAATGFVKKDQLGKNEEGAPQEGILEDMPVDPDNEAYEMPSEEGYQDYEPEA

SEQ ID NO: 583 - protein, 140 aa, Artificial Sequence
  Synthetic Construct
MDVFMKGLSKAKEGVVAAAEKTKQGVAEAAGKTKEGVLYVGSKTKEGVVHGVATVAEKTKEQVTNVGGAVVTGVTAVAQKTVEGAGSIRAATGFVKKDQLGKNEEGAPQEGILEDMPVDPDNEAYEMPSEEGYQDYEPEA

SEQ ID NO: 584 - protein, 140 aa, Artificial Sequence
  Synthetic Construct
MDVFMKGLSKAKEGVVAAAEKTKQGVAEAAGKTKEGVLYVGSKTKEGVVHGVATVAEKTKEQVTNVGGAVVTGVTAVAQKTVEGAGSIHAATGFVKKDQLGKNEEGAPQEGILEDMPVDPDNEAYEMPSEEGYQDYEPEA

SEQ ID NO: 585 - protein, 140 aa, Artificial Sequence
  Synthetic Construct
MDVFMKGLSKAKEGVVAAAEKTKQGVAEAAGKTKEGVLYVGSKTKEGVVHGVATVAEKTKEQVTNVGGAVVTGVTAVAQKTVEGAGSIEAATGFVKKDQLGKNEEGAPQEGILEDMPVDPDNEAYEMPSEEGYQDYEPEA

SEQ ID NO: 586 - protein, 140 aa, Artificial Sequence
  Synthetic Construct
MDVFMKGLSKAKEGVVAAAEKTKQGVAEAAGKTKEGVLYVGSKTKEGVVHGVATVAEKTKEQVTNVGGAVVTGVTAVAQKTVEGAGSIDAATGFVKKDQLGKNEEGAPQEGILEDMPVDPDNEAYEMPSEEGYQDYEPEA

SEQ ID NO: 587 - protein, 140 aa, Artificial Sequence
  Synthetic Construct
MDVFMKGLSKAKEGVVAAAEKTKQGVAEAAGKTKEGVLYVGSKTKEGVVHGVATVAEKTKEQVTNVGGAVVTGVTAVAQKTVEGAGSISAATGFVKKDQLGKNEEGAPQEGILEDMPVDPDNEAYEMPSEEGYQDYEPEA

SEQ ID NO: 588 - protein, 140 aa, Artificial Sequence
  Synthetic Construct
MDVFMKGLSKAKEGVVAAAEKTKQGVAEAAGKTKEGVLYVGSKTKEGVVHGVATVAEKTKEQVTNVGGAVVTGVTAVAQKTVEGAGSITAATGFVKKDQLGKNEEGAPQEGILEDMPVDPDNEAYEMPSEEGYQDYEPEA

SEQ ID NO: 589 - protein, 140 aa, Artificial Sequence
  Synthetic Construct
MDVFMKGLSKAKEGVVAAAEKTKQGVAEAAGKTKEGVLYVGSKTKEGVVHGVATVAEKTKEQVTNVGGAVVTGVTAVAQKTVEGAGSINAATGFVKKDQLGKNEEGAPQEGILEDMPVDPDNEAYEMPSEEGYQDYEPEA

SEQ ID NO: 590 - protein, 140 aa, Artificial Sequence
  Synthetic Construct
MDVFMKGLSKAKEGVVAAAEKTKQGVAEAAGKTKEGVLYVGSKTKEGVVHGVATVAEKTKEQVTNVGGAVVTGVTAVAQKTVEGAGSIQAATGFVKKDQLGKNEEGAPQEGILEDMPVDPDNEAYEMPSEEGYQDYEPEA

SEQ ID NO: 591 - protein, 140 aa, Artificial Sequence
  Synthetic Construct
MDVFMKGLSKAKEGVVAAAEKTKQGVAEAAGKTKEGVLYVGSKTKEGVVHGVATVAEKTKEQVTNVGGAVVTGVTAVAQKTVEGAGSICAATGFVKKDQLGKNEEGAPQEGILEDMPVDPDNEAYEMPSEEGYQDYEPEA

SEQ ID NO: 592 - protein, 140 aa, Artificial Sequence
  Synthetic Construct
MDVFMKGLSKAKEGVVAAAEKTKQGVAEAAGKTKEGVLYVGSKTKEGVVHGVATVAEKTKEQVTNVGGAVVTGVTAVAQKTVEGAGSIAPATGFVKKDQLGKNEEGAPQEGILEDMPVDPDNEAYEMPSEEGYQDYEPEA

SEQ ID NO: 593 - protein, 140 aa, Artificial Sequence
  Synthetic Construct
MDVFMKGLSKAKEGVVAAAEKTKQGVAEAAGKTKEGVLYVGSKTKEGVVHGVATVAEKTKEQVTNVGGAVVTGVTAVAQKTVEGAGSIAGATGFVKKDQLGKNEEGAPQEGILEDMPVDPDNEAYEMPSEEGYQDYEPEA

SEQ ID NO: 594 - protein, 140 aa, Artificial Sequence
  Synthetic Construct
MDVFMKGLSKAKEGVVAAAEKTKQGVAEAAGKTKEGVLYVGSKTKEGVVHGVATVAEKTKEQVTNVGGAVVTGVTAVAQKTVEGAGSIAKATGFVKKDQLGKNEEGAPQEGILEDMPVDPDNEAYEMPSEEGYQDYEPEA

SEQ ID NO: 595 - protein, 140 aa, Artificial Sequence
  Synthetic Construct
MDVFMKGLSKAKEGVVAAAEKTKQGVAEAAGKTKEGVLYVGSKTKEGVVHGVATVAEKTKEQVTNVGGAVVTGVTAVAQKTVEGAGSIARATGFVKKDQLGKNEEGAPQEGILEDMPVDPDNEAYEMPSEEGYQDYEPEA

SEQ ID NO: 596 - protein, 140 aa, Artificial Sequence
  Synthetic Construct
MDVFMKGLSKAKEGVVAAAEKTKQGVAEAAGKTKEGVLYVGSKTKEGVVHGVATVAEKTKEQVTNVGGAVVTGVTAVAQKTVEGAGSIAHATGFVKKDQLGKNEEGAPQEGILEDMPVDPDNEAYEMPSEEGYQDYEPEA

SEQ ID NO: 597 - protein, 140 aa, Artificial Sequence
  Synthetic Construct
MDVFMKGLSKAKEGVVAAAEKTKQGVAEAAGKTKEGVLYVGSKTKEGVVHGVATVAEKTKEQVTNVGGAVVTGVTAVAQKTVEGAGSIAEATGFVKKDQLGKNEEGAPQEGILEDMPVDPDNEAYEMPSEEGYQDYEPEA

SEQ ID NO: 598 - protein, 140 aa, Artificial Sequence
  Synthetic Construct
MDVFMKGLSKAKEGVVAAAEKTKQGVAEAAGKTKEGVLYVGSKTKEGVVHGVATVAEKTKEQVTNVGGAVVTGVTAVAQKTVEGAGSIADATGFVKKDQLGKNEEGAPQEGILEDMPVDPDNEAYEMPSEEGYQDYEPEA

SEQ ID NO: 599 - protein, 140 aa, Artificial Sequence
  Synthetic Construct
MDVFMKGLSKAKEGVVAAAEKTKQGVAEAAGKTKEGVLYVGSKTKEGVVHGVATVAEKTKEQVTNVGGAVVTGVTAVAQKTVEGAGSIASATGFVKKDQLGKNEEGAPQEGILEDMPVDPDNEAYEMPSEEGYQDYEPEA

SEQ ID NO: 600 - protein, 140 aa, Artificial Sequence
  Synthetic Construct
MDVFMKGLSKAKEGVVAAAEKTKQGVAEAAGKTKEGVLYVGSKTKEGVVHGVATVAEKTKEQVTNVGGAVVTGVTAVAQKTVEGAGSIATATGFVKKDQLGKNEEGAPQEGILEDMPVDPDNEAYEMPSEEGYQDYEPEA

SEQ ID NO: 601 - protein, 140 aa, Artificial Sequence
  Synthetic Construct
MDVFMKGLSKAKEGVVAAAEKTKQGVAEAAGKTKEGVLYVGSKTKEGVVHGVATVAEKTKEQVTNVGGAVVTGVTAVAQKTVEGAGSIANATGFVKKDQLGKNEEGAPQEGILEDMPVDPDNEAYEMPSEEGYQDYEPEA

SEQ ID NO: 602 - protein, 140 aa, Artificial Sequence
  Synthetic Construct
MDVFMKGLSKAKEGVVAAAEKTKQGVAEAAGKTKEGVLYVGSKTKEGVVHGVATVAEKTKEQVTNVGGAVVTGVTAVAQKTVEGAGSIAQATGFVKKDQLGKNEEGAPQEGILEDMPVDPDNEAYEMPSEEGYQDYEPEA

SEQ ID NO: 603 - protein, 140 aa, Artificial Sequence
  Synthetic Construct
MDVFMKGLSKAKEGVVAAAEKTKQGVAEAAGKTKEGVLYVGSKTKEGVVHGVATVAEKTKEQVTNVGGAVVTGVTAVAQKTVEGAGSIACATGFVKKDQLGKNEEGAPQEGILEDMPVDPDNEAYEMPSEEGYQDYEPEA

SEQ ID NO: 604 - protein, 140 aa, Artificial Sequence
  Synthetic Construct
MDVFMKGLSKAKEGVVAAAEKTKQGVAEAAGKTKEGVLYVGSKTKEGVVHGVATVAEKTKEQVTNVGGAVVTGVTAVAQKTVEGAGSIAAPTGFVKKDQLGKNEEGAPQEGILEDMPVDPDNEAYEMPSEEGYQDYEPEA

SEQ ID NO: 605 - protein, 140 aa, Artificial Sequence
  Synthetic Construct
MDVFMKGLSKAKEGVVAAAEKTKQGVAEAAGKTKEGVLYVGSKTKEGVVHGVATVAEKTKEQVTNVGGAVVTGVTAVAQKTVEGAGSIAAGTGFVKKDQLGKNEEGAPQEGILEDMPVDPDNEAYEMPSEEGYQDYEPEA

SEQ ID NO: 606 - protein, 140 aa, Artificial Sequence
  Synthetic Construct
MDVFMKGLSKAKEGVVAAAEKTKQGVAEAAGKTKEGVLYVGSKTKEGVVHGVATVAEKTKEQVTNVGGAVVTGVTAVAQKTVEGAGSIAAKTGFVKKDQLGKNEEGAPQEGILEDMPVDPDNEAYEMPSEEGYQDYEPEA

SEQ ID NO: 607 - protein, 140 aa, Artificial Sequence
  Synthetic Construct
MDVFMKGLSKAKEGVVAAAEKTKQGVAEAAGKTKEGVLYVGSKTKEGVVHGVATVAEKTKEQVTNVGGAVVTGVTAVAQKTVEGAGSIAARTGFVKKDQLGKNEEGAPQEGILEDMPVDPDNEAYEMPSEEGYQDYEPEA

SEQ ID NO: 608 - protein, 140 aa, Artificial Sequence
  Synthetic Construct
MDVFMKGLSKAKEGVVAAAEKTKQGVAEAAGKTKEGVLYVGSKTKEGVVHGVATVAEKTKEQVTNVGGAVVTGVTAVAQKTVEGAGSIAAHTGFVKKDQLGKNEEGAPQEGILEDMPVDPDNEAYEMPSEEGYQDYEPEA

SEQ ID NO: 609 - protein, 140 aa, Artificial Sequence
  Synthetic Construct
MDVFMKGLSKAKEGVVAAAEKTKQGVAEAAGKTKEGVLYVGSKTKEGVVHGVATVAEKTKEQVTNVGGAVVTGVTAVAQKTVEGAGSIAAETGFVKKDQLGKNEEGAPQEGILEDMPVDPDNEAYEMPSEEGYQDYEPEA

SEQ ID NO: 610 - protein, 140 aa, Artificial Sequence
  Synthetic Construct
MDVFMKGLSKAKEGVVAAAEKTKQGVAEAAGKTKEGVLYVGSKTKEGVVHGVATVAEKTKEQVTNVGGAVVTGVTAVAQKTVEGAGSIAADTGFVKKDQLGKNEEGAPQEGILEDMPVDPDNEAYEMPSEEGYQDYEPEA

SEQ ID NO: 611 - protein, 140 aa, Artificial Sequence
  Synthetic Construct
MDVFMKGLSKAKEGVVAAAEKTKQGVAEAAGKTKEGVLYVGSKTKEGVVHGVATVAEKTKEQVTNVGGAVVTGVTAVAQKTVEGAGSIAASTGFVKKDQLGKNEEGAPQEGILEDMPVDPDNEAYEMPSEEGYQDYEPEA

SEQ ID NO: 612 - protein, 140 aa, Artificial Sequence
  Synthetic Construct
MDVFMKGLSKAKEGVVAAAEKTKQGVAEAAGKTKEGVLYVGSKTKEGVVHGVATVAEKTKEQVTNVGGAVVTGVTAVAQKTVEGAGSIAATTGFVKKDQLGKNEEGAPQEGILEDMPVDPDNEAYEMPSEEGYQDYEPEA

SEQ ID NO: 613 - protein, 140 aa, Artificial Sequence
  Synthetic Construct
MDVFMKGLSKAKEGVVAAAEKTKQGVAEAAGKTKEGVLYVGSKTKEGVVHGVATVAEKTKEQVTNVGGAVVTGVTAVAQKTVEGAGSIAANTGFVKKDQLGKNEEGAPQEGILEDMPVDPDNEAYEMPSEEGYQDYEPEA

SEQ ID NO: 614 - protein, 140 aa, Artificial Sequence
  Synthetic Construct
MDVFMKGLSKAKEGVVAAAEKTKQGVAEAAGKTKEGVLYVGSKTKEGVVHGVATVAEKTKEQVTNVGGAVVTGVTAVAQKTVEGAGSIAAQTGFVKKDQLGKNEEGAPQEGILEDMPVDPDNEAYEMPSEEGYQDYEPEA

SEQ ID NO: 615 - protein, 140 aa, Artificial Sequence
  Synthetic Construct
MDVFMKGLSKAKEGVVAAAEKTKQGVAEAAGKTKEGVLYVGSKTKEGVVHGVATVAEKTKEQVTNVGGAVVTGVTAVAQKTVEGAGSIAACTGFVKKDQLGKNEEGAPQEGILEDMPVDPDNEAYEMPSEEGYQDYEPEA

SEQ ID NO: 616 - protein, 140 aa, Artificial Sequence
  Synthetic Construct
MDVFMKGLSKAKEGVVAAAEKTKQGVAEAAGKTKEGVLYVGSKTKEGVVHGVATVAEKTKEQVTNVGGAVVTGVTAVAQKTVEGAGSIAAAPGFVKKDQLGKNEEGAPQEGILEDMPVDPDNEAYEMPSEEGYQDYEPEA

SEQ ID NO: 617 - protein, 140 aa, Artificial Sequence
  Synthetic Construct
MDVFMKGLSKAKEGVVAAAEKTKQGVAEAAGKTKEGVLYVGSKTKEGVVHGVATVAEKTKEQVTNVGGAVVTGVTAVAQKTVEGAGSIAAAGGFVKKDQLGKNEEGAPQEGILEDMPVDPDNEAYEMPSEEGYQDYEPEA

SEQ ID NO: 618 - protein, 140 aa, Artificial Sequence
  Synthetic Construct
MDVFMKGLSKAKEGVVAAAEKTKQGVAEAAGKTKEGVLYVGSKTKEGVVHGVATVAEKTKEQVTNVGGAVVTGVTAVAQKTVEGAGSIAAAKGFVKKDQLGKNEEGAPQEGILEDMPVDPDNEAYEMPSEEGYQDYEPEA

SEQ ID NO: 619 - protein, 140 aa, Artificial Sequence
  Synthetic Construct
MDVFMKGLSKAKEGVVAAAEKTKQGVAEAAGKTKEGVLYVGSKTKEGVVHGVATVAEKTKEQVTNVGGAVVTGVTAVAQKTVEGAGSIAAARGFVKKDQLGKNEEGAPQEGILEDMPVDPDNEAYEMPSEEGYQDYEPEA

SEQ ID NO: 620 - protein, 140 aa, Artificial Sequence
  Synthetic Construct
MDVFMKGLSKAKEGVVAAAEKTKQGVAEAAGKTKEGVLYVGSKTKEGVVHGVATVAEKTKEQVTNVGGAVVTGVTAVAQKTVEGAGSIAAAHGFVKKDQLGKNEEGAPQEGILEDMPVDPDNEAYEMPSEEGYQDYEPEA

SEQ ID NO: 621 - protein, 140 aa, Artificial Sequence
  Synthetic Construct
MDVFMKGLSKAKEGVVAAAEKTKQGVAEAAGKTKEGVLYVGSKTKEGVVHGVATVAEKTKEQVTNVGGAVVTGVTAVAQKTVEGAGSIAAAEGFVKKDQLGKNEEGAPQEGILEDMPVDPDNEAYEMPSEEGYQDYEPEA

SEQ ID NO: 622 - protein, 140 aa, Artificial Sequence
  Synthetic Construct
MDVFMKGLSKAKEGVVAAAEKTKQGVAEAAGKTKEGVLYVGSKTKEGVVHGVATVAEKTKEQVTNVGGAVVTGVTAVAQKTVEGAGSIAAADGFVKKDQLGKNEEGAPQEGILEDMPVDPDNEAYEMPSEEGYQDYEPEA

SEQ ID NO: 623 - protein, 140 aa, Artificial Sequence
  Synthetic Construct
MDVFMKGLSKAKEGVVAAAEKTKQGVAEAAGKTKEGVLYVGSKTKEGVVHGVATVAEKTKEQVTNVGGAVVTGVTAVAQKTVEGAGSIAAASGFVKKDQLGKNEEGAPQEGILEDMPVDPDNEAYEMPSEEGYQDYEPEA

SEQ ID NO: 624 - protein, 140 aa, Artificial Sequence; identical to SEQ ID NO: 208
  Synthetic Construct

SEQ ID NO: 625 - protein, 140 aa, Artificial Sequence
  Synthetic Construct
MDVFMKGLSKAKEGVVAAAEKTKQGVAEAAGKTKEGVLYVGSKTKEGVVHGVATVAEKTKEQVTNVGGAVVTGVTAVAQKTVEGAGSIAAANGFVKKDQLGKNEEGAPQEGILEDMPVDPDNEAYEMPSEEGYQDYEPEA

SEQ ID NO: 626 - protein, 140 aa, Artificial Sequence
  Synthetic Construct
MDVFMKGLSKAKEGVVAAAEKTKQGVAEAAGKTKEGVLYVGSKTKEGVVHGVATVAEKTKEQVTNVGGAVVTGVTAVAQKTVEGAGSIAAAQGFVKKDQLGKNEEGAPQEGILEDMPVDPDNEAYEMPSEEGYQDYEPEA

SEQ ID NO: 627 - protein, 140 aa, Artificial Sequence
  Synthetic Construct
MDVFMKGLSKAKEGVVAAAEKTKQGVAEAAGKTKEGVLYVGSKTKEGVVHGVATVAEKTKEQVTNVGGAVVTGVTAVAQKTVEGAGSIAAACGFVKKDQLGKNEEGAPQEGILEDMPVDPDNEAYEMPSEEGYQDYEPEA

SEQ ID NO: 628 - protein, 140 aa, Artificial Sequence
  Synthetic Construct
MDVFMKGLSKAKEGVVAAAEKTKQGVAEAAGKTKEGVLYVGSKTKEGVVHGVATVAEKTKEQVTNVGGAVVTGVTAVAQKTVEGAGSIAAATPFVKKDQLGKNEEGAPQEGILEDMPVDPDNEAYEMPSEEGYQDYEPEA

SEQ ID NO: 629 - protein, 140 aa, Artificial Sequence; identical to SEQ ID NO: 208
  Synthetic Construct

SEQ ID NO: 630 - protein, 140 aa, Artificial Sequence
  Synthetic Construct
MDVFMKGLSKAKEGVVAAAEKTKQGVAEAAGKTKEGVLYVGSKTKEGVVHGVATVAEKTKEQVTNVGGAVVTGVTAVAQKTVEGAGSIAAATKFVKKDQLGKNEEGAPQEGILEDMPVDPDNEAYEMPSEEGYQDYEPEA

SEQ ID NO: 631 - protein, 140 aa, Artificial Sequence
  Synthetic Construct
MDVFMKGLSKAKEGVVAAAEKTKQGVAEAAGKTKEGVLYVGSKTKEGVVHGVATVAEKTKEQVTNVGGAVVTGVTAVAQKTVEGAGSIAAATRFVKKDQLGKNEEGAPQEGILEDMPVDPDNEAYEMPSEEGYQDYEPEA

SEQ ID NO: 632 - protein, 140 aa, Artificial Sequence
  Synthetic Construct
MDVFMKGLSKAKEGVVAAAEKTKQGVAEAAGKTKEGVLYVGSKTKEGVVHGVATVAEKTKEQVTNVGGAVVTGVTAVAQKTVEGAGSIAAATHFVKKDQLGKNEEGAPQEGILEDMPVDPDNEAYEMPSEEGYQDYEPEA

SEQ ID NO: 633 - protein, 140 aa, Artificial Sequence
  Synthetic Construct
MDVFMKGLSKAKEGVVAAAEKTKQGVAEAAGKTKEGVLYVGSKTKEGVVHGVATVAEKTKEQVTNVGGAVVTGVTAVAQKTVEGAGSIAAATEFVKKDQLGKNEEGAPQEGILEDMPVDPDNEAYEMPSEEGYQDYEPEA

SEQ ID NO: 634 - protein, 140 aa, Artificial Sequence
  Synthetic Construct
MDVFMKGLSKAKEGVVAAAEKTKQGVAEAAGKTKEGVLYVGSKTKEGVVHGVATVAEKTKEQVTNVGGAVVTGVTAVAQKTVEGAGSIAAATDFVKKDQLGKNEEGAPQEGILEDMPVDPDNEAYEMPSEEGYQDYEPEA

SEQ ID NO: 635 - protein, 140 aa, Artificial Sequence
  Synthetic Construct
MDVFMKGLSKAKEGVVAAAEKTKQGVAEAAGKTKEGVLYVGSKTKEGVVHGVATVAEKTKEQVTNVGGAVVTGVTAVAQKTVEGAGSIAAATSFVKKDQLGKNEEGAPQEGILEDMPVDPDNEAYEMPSEEGYQDYEPEA

SEQ ID NO: 636 - protein, 140 aa, Artificial Sequence
  Synthetic Construct
MDVFMKGLSKAKEGVVAAAEKTKQGVAEAAGKTKEGVLYVGSKTKEGVVHGVATVAEKTKEQVTNVGGAVVTGVTAVAQKTVEGAGSIAAATTFVKKDQLGKNEEGAPQEGILEDMPVDPDNEAYEMPSEEGYQDYEPEA

SEQ ID NO: 637 - protein, 140 aa, Artificial Sequence
  Synthetic Construct
MDVFMKGLSKAKEGVVAAAEKTKQGVAEAAGKTKEGVLYVGSKTKEGVVHGVATVAEKTKEQVTNVGGAVVTGVTAVAQKTVEGAGSIAAATNFVKKDQLGKNEEGAPQEGILEDMPVDPDNEAYEMPSEEGYQDYEPEA

SEQ ID NO: 638 - protein, 140 aa, Artificial Sequence
  Synthetic Construct
MDVFMKGLSKAKEGVVAAAEKTKQGVAEAAGKTKEGVLYVGSKTKEGVVHGVATVAEKTKEQVTNVGGAVVTGVTAVAQKTVEGAGSIAAATQFVKKDQLGKNEEGAPQEGILEDMPVDPDNEAYEMPSEEGYQDYEPEA

SEQ ID NO: 639 - protein, 140 aa, Artificial Sequence
  Synthetic Construct
MDVFMKGLSKAKEGVVAAAEKTKQGVAEAAGKTKEGVLYVGSKTKEGVVHGVATVAEKTKEQVTNVGGAVVTGVTAVAQKTVEGAGSIAAATCFVKKDQLGKNEEGAPQEGILEDMPVDPDNEAYEMPSEEGYQDYEPEA

SEQ ID NO: 640 - protein, 140 aa, Artificial Sequence
  Synthetic Construct
MDVFMKGLSKAKEGVVAAAEKTKQGVAEAAGKTKEGVLYVGSKTKEGVVHGVATVAEKTKEQVTNVGGAVVTGVTAVAQKTVEGAGSIAAATGPVKKDQLGKNEEGAPQEGILEDMPVDPDNEAYEMPSEEGYQDYEPEA

SEQ ID NO: 641 - protein, 140 aa, Artificial Sequence
  Synthetic Construct
MDVFMKGLSKAKEGVVAAAEKTKQGVAEAAGKTKEGVLYVGSKTKEGVVHGVATVAEKTKEQVTNVGGAVVTGVTAVAQKTVEGAGSIAAATGGVKKDQLGKNEEGAPQEGILEDMPVDPDNEAYEMPSEEGYQDYEPEA

SEQ ID NO: 642 - protein, 140 aa, Artificial Sequence
  Synthetic Construct
MDVFMKGLSKAKEGVVAAAEKTKQGVAEAAGKTKEGVLYVGSKTKEGVVHGVATVAEKTKEQVTNVGGAVVTGVTAVAQKTVEGAGSIAAATGKVKKDQLGKNEEGAPQEGILEDMPVDPDNEAYEMPSEEGYQDYEPEA

SEQ ID NO: 643 - protein, 140 aa, Artificial Sequence
  Synthetic Construct
MDVFMKGLSKAKEGVVAAAEKTKQGVAEAAGKTKEGVLYVGSKTKEGVVHGVATVAEKTKEQVTNVGGAVVTGVTAVAQKTVEGAGSIAAATGRVKKDQLGKNEEGAPQEGILEDMPVDPDNEAYEMPSEEGYQDYEPEA

SEQ ID NO: 644 - protein, 140 aa, Artificial Sequence
  Synthetic Construct
MDVFMKGLSKAKEGVVAAAEKTKQGVAEAAGKTKEGVLYVGSKTKEGVVHGVATVAEKTKEQVTNVGGAVVTGVTAVAQKTVEGAGSIAAATGHVKKDQLGKNEEGAPQEGILEDMPVDPDNEAYEMPSEEGYQDYEPEA

SEQ ID NO: 645 - protein, 140 aa, Artificial Sequence
  Synthetic Construct
MDVFMKGLSKAKEGVVAAAEKTKQGVAEAAGKTKEGVLYVGSKTKEGVVHGVATVAEKTKEQVTNVGGAVVTGVTAVAQKTVEGAGSIAAATGEVKKDQLGKNEEGAPQEGILEDMPVDPDNEAYEMPSEEGYQDYEPEA

SEQ ID NO: 646 - protein, 140 aa, Artificial Sequence
  Synthetic Construct
MDVFMKGLSKAKEGVVAAAEKTKQGVAEAAGKTKEGVLYVGSKTKEGVVHGVATVAEKTKEQVTNVGGAVVTGVTAVAQKTVEGAGSIAAATGDVKKDQLGKNEEGAPQEGILEDMPVDPDNEAYEMPSEEGYQDYEPEA

SEQ ID NO: 647 - protein, 140 aa, Artificial Sequence
  Synthetic Construct
MDVFMKGLSKAKEGVVAAAEKTKQGVAEAAGKTKEGVLYVGSKTKEGVVHGVATVAEKTKEQVTNVGGAVVTGVTAVAQKTVEGAGSIAAATGSVKKDQLGKNEEGAPQEGILEDMPVDPDNEAYEMPSEEGYQDYEPEA

SEQ ID NO: 648 - protein, 140 aa, Artificial Sequence
  Synthetic Construct
MDVFMKGLSKAKEGVVAAAEKTKQGVAEAAGKTKEGVLYVGSKTKEGVVHGVATVAEKTKEQVTNVGGAVVTGVTAVAQKTVEGAGSIAAATGTVKKDQLGKNEEGAPQEGILEDMPVDPDNEAYEMPSEEGYQDYEPEA

SEQ ID NO: 649 - protein, 140 aa, Artificial Sequence
  Synthetic Construct
MDVFMKGLSKAKEGVVAAAEKTKQGVAEAAGKTKEGVLYVGSKTKEGVVHGVATVAEKTKEQVTNVGGAVVTGVTAVAQKTVEGAGSIAAATGNVKKDQLGKNEEGAPQEGILEDMPVDPDNEAYEMPSEEGYQDYEPEA

SEQ ID NO: 650 - protein, 140 aa, Artificial Sequence
  Synthetic Construct
MDVFMKGLSKAKEGVVAAAEKTKQGVAEAAGKTKEGVLYVGSKTKEGVVHGVATVAEKTKEQVTNVGGAVVTGVTAVAQKTVEGAGSIAAATGQVKKDQLGKNEEGAPQEGILEDMPVDPDNEAYEMPSEEGYQDYEPEA

SEQ ID NO: 651 - protein, 140 aa, Artificial Sequence
  Synthetic Construct
MDVFMKGLSKAKEGVVAAAEKTKQGVAEAAGKTKEGVLYVGSKTKEGVVHGVATVAEKTKEQVTNVGGAVVTGVTAVAQKTVEGAGSIAAATGCVKKDQLGKNEEGAPQEGILEDMPVDPDNEAYEMPSEEGYQDYEPEA

SEQ ID NO: 652 - protein, 140 aa, Artificial Sequence
  Synthetic Construct
MDVFMKGLSKAKEGVVAAAEKTKQGVAEAAGKTKEGVLYVGSKTKEGVVHGVATVAEKTKEQVTNVGGAVVTGVTAVAQKTVEGAGSIAAATGFPKKDQLGKNEEGAPQEGILEDMPVDPDNEAYEMPSEEGYQDYEPEA

SEQ ID NO: 653 - protein, 140 aa, Artificial Sequence
  Synthetic Construct
MDVFMKGLSKAKEGVVAAAEKTKQGVAEAAGKTKEGVLYVGSKTKEGVVHGVATVAEKTKEQVTNVGGAVVTGVTAVAQKTVEGAGSIAAATGFGKKDQLGKNEEGAPQEGILEDMPVDPDNEAYEMPSEEGYQDYEPEA

SEQ ID NO: 654 - protein, 140 aa, Artificial Sequence
  Synthetic Construct
MDVFMKGLSKAKEGVVAAAEKTKQGVAEAAGKTKEGVLYVGSKTKEGVVHGVATVAEKTKEQVTNVGGAVVTGVTAVAQKTVEGAGSIAAATGFKKKDQLGKNEEGAPQEGILEDMPVDPDNEAYEMPSEEGYQDYEPEA

SEQ ID NO: 655 - protein, 140 aa, Artificial Sequence
  Synthetic Construct
MDVFMKGLSKAKEGVVAAAEKTKQGVAEAAGKTKEGVLYVGSKTKEGVVHGVATVAEKTKEQVTNVGGAVVTGVTAVAQKTVEGAGSIAAATGFRKKDQLGKNEEGAPQEGILEDMPVDPDNEAYEMPSEEGYQDYEPEA

SEQ ID NO: 656 - protein, 140 aa, Artificial Sequence
  Synthetic Construct
MDVFMKGLSKAKEGVVAAAEKTKQGVAEAAGKTKEGVLYVGSKTKEGVVHGVATVAEKTKEQVTNVGGAVVTGVTAVAQKTVEGAGSIAAATGFHKKDQLGKNEEGAPQEGILEDMPVDPDNEAYEMPSEEGYQDYEPEA

SEQ ID NO: 657 - protein, 140 aa, Artificial Sequence
  Synthetic Construct
MDVFMKGLSKAKEGVVAAAEKTKQGVAEAAGKTKEGVLYVGSKTKEGVVHGVATVAEKTKEQVTNVGGAVVTGVTAVAQKTVEGAGSIAAATGFEKKDQLGKNEEGAPQEGILEDMPVDPDNEAYEMPSEEGYQDYEPEA

SEQ ID NO: 658 - protein, 140 aa, Artificial Sequence
  Synthetic Construct
MDVFMKGLSKAKEGVVAAAEKTKQGVAEAAGKTKEGVLYVGSKTKEGVVHGVATVAEKTKEQVTNVGGAVVTGVTAVAQKTVEGAGSIAAATGFDKKDQLGKNEEGAPQEGILEDMPVDPDNEAYEMPSEEGYQDYEPEA

SEQ ID NO: 659 - protein, 140 aa, Artificial Sequence
  Synthetic Construct
MDVFMKGLSKAKEGVVAAAEKTKQGVAEAAGKTKEGVLYVGSKTKEGVVHGVATVAEKTKEQVTNVGGAVVTGVTAVAQKTVEGAGSIAAATGFSKKDQLGKNEEGAPQEGILEDMPVDPDNEAYEMPSEEGYQDYEPEA

SEQ ID NO: 660 - protein, 140 aa, Artificial Sequence
  Synthetic Construct
MDVFMKGLSKAKEGVVAAAEKTKQGVAEAAGKTKEGVLYVGSKTKEGVVHGVATVAEKTKEQVTNVGGAVVTGVTAVAQKTVEGAGSIAAATGFTKKDQLGKNEEGAPQEGILEDMPVDPDNEAYEMPSEEGYQDYEPEA

SEQ ID NO: 661 - protein, 140 aa, Artificial Sequence
  Synthetic Construct
MDVFMKGLSKAKEGVVAAAEKTKQGVAEAAGKTKEGVLYVGSKTKEGVVHGVATVAEKTKEQVTNVGGAVVTGVTAVAQKTVEGAGSIAAATGFNKKDQLGKNEEGAPQEGILEDMPVDPDNEAYEMPSEEGYQDYEPEA

SEQ ID NO: 662 - protein, 140 aa, Artificial Sequence
  Synthetic Construct
MDVFMKGLSKAKEGVVAAAEKTKQGVAEAAGKTKEGVLYVGSKTKEGVVHGVATVAEKTKEQVTNVGGAVVTGVTAVAQKTVEGAGSIAAATGFQKKDQLGKNEEGAPQEGILEDMPVDPDNEAYEMPSEEGYQDYEPEA

SEQ ID NO: 663 - protein, 140 aa, Artificial Sequence
  Synthetic Construct
MDVFMKGLSKAKEGVVAAAEKTKQGVAEAAGKTKEGVLYVGSKTKEGVVHGVATVAEKTKEQVTNVGGAVVTGVTAVAQKTVEGAGSIAAATGFCKKDQLGKNEEGAPQEGILEDMPVDPDNEAYEMPSEEGYQDYEPEA

SEQ ID NO: 664 - protein, 140 aa, Artificial Sequence
  Synthetic Construct
  misc_feature (61)..(61): Xaa can be any beta-sheet destabilizing modification
MDVFMKGLSKAKEGVVAAAEKTKQGVAEAAGKTKEGVLYVGSKTKEGVVHGVATVAEKTKXQVTNVGGAVVTGVTAVAQKTVEGAGSIAAATGFVKKDQLGKNEEGAPQEGILEDMPVDPDNEAYEMPSEEGYQDYEPEA

SEQ ID NO: 665 - protein, 140 aa, Artificial Sequence
  Synthetic Construct
  misc_feature (62)..(62): Xaa can be any beta-sheet destabilizing modification
MDVFMKGLSKAKEGVVAAAEKTKQGVAEAAGKTKEGVLYVGSKTKEGVVHGVATVAEKTKEXVTNVGGAVVTGVTAVAQKTVEGAGSIAAATGFVKKDQLGKNEEGAPQEGILEDMPVDPDNEAYEMPSEEGYQDYEPEA

SEQ ID NO: 666 - protein, 140 aa, Artificial Sequence
  Synthetic Construct
  misc_feature (63)..(63): Xaa can be any beta-sheet destabilizing modification
MDVFMKGLSKAKEGVVAAAEKTKQGVAEAAGKTKEGVLYVGSKTKEGVVHGVATVAEKTKEQXTNVGGAVVTGVTAVAQKTVEGAGSIAAATGFVKKDQLGKNEEGAPQEGILEDMPVDPDNEAYEMPSEEGYQDYEPEA

SEQ ID NO: 667 - protein, 140 aa, Artificial Sequence
  Synthetic Construct
  misc_feature (64)..(64): Xaa can be any beta-sheet destabilizing modification
MDVFMKGLSKAKEGVVAAAEKTKQGVAEAAGKTKEGVLYVGSKTKEGVVHGVATVAEKTKEQVXNVGGAVVTGVTAVAQKTVEGAGSIAAATGFVKKDQLGKNEEGAPQEGILEDMPVDPDNEAYEMPSEEGYQDYEPEA

SEQ ID NO: 668 - protein, 140 aa, Artificial Sequence
  Synthetic Construct
  misc_feature (65)..(65): Xaa can be any beta-sheet destabilizing modification
MDVFMKGLSKAKEGVVAAAEKTKQGVAEAAGKTKEGVLYVGSKTKEGVVHGVATVAEKTKEQVTXVGGAVVTGVTAVAQKTVEGAGSIAAATGFVKKDQLGKNEEGAPQEGILEDMPVDPDNEAYEMPSEEGYQDYEPEA

SEQ ID NO: 669 - protein, 140 aa, Artificial Sequence
  Synthetic Construct
  misc_feature (66)..(66): Xaa can be any beta-sheet destabilizing modification
MDVFMKGLSKAKEGVVAAAEKTKQGVAEAAGKTKEGVLYVGSKTKEGVVHGVATVAEKTKEQVTNXGGAVVTGVTAVAQKTVEGAGSIAAATGFVKKDQLGKNEEGAPQEGILEDMPVDPDNEAYEMPSEEGYQDYEPEA

SEQ ID NO: 670 - protein, 140 aa, Artificial Sequence
  Synthetic Construct
  misc_feature (67)..(67): Xaa can be any beta-sheet destabilizing modification
MDVFMKGLSKAKEGVVAAAEKTKQGVAEAAGKTKEGVLYVGSKTKEGVVHGVATVAEKTKEQVTNVXGAVVTGVTAVAQKTVEGAGSIAAATGFVKKDQLGKNEEGAPQEGILEDMPVDPDNEAYEMPSEEGYQDYEPEA

SEQ ID NO: 671 - protein, 140 aa, Artificial Sequence
  Synthetic Construct
  misc_feature (68)..(68): Xaa can be any beta-sheet destabilizing modification
MDVFMKGLSKAKEGVVAAAEKTKQGVAEAAGKTKEGVLYVGSKTKEGVVHGVATVAEKTKEQVTNVGXAVVTGVTAVAQKTVEGAGSIAAATGFVKKDQLGKNEEGAPQEGILEDMPVDPDNEAYEMPSEEGYQDYEPEA

SEQ ID NO: 672 - protein, 140 aa, Artificial Sequence
  Synthetic Construct
  misc_feature (69)..(69): Xaa can be any beta-sheet destabilizing modification
MDVFMKGLSKAKEGVVAAAEKTKQGVAEAAGKTKEGVLYVGSKTKEGVVHGVATVAEKTKEQVTNVGGXVVTGVTAVAQKTVEGAGSIAAATGFVKKDQLGKNEEGAPQEGILEDMPVDPDNEAYEMPSEEGYQDYEPEA

SEQ ID NO: 673 - protein, 140 aa, Artificial Sequence
  Synthetic Construct
  misc_feature (70)..(70): Xaa can be any beta-sheet destabilizing modification
MDVFMKGLSKAKEGVVAAAEKTKQGVAEAAGKTKEGVLYVGSKTKEGVVHGVATVAEKTKEQVTNVGGAXVTGVTAVAQKTVEGAGSIAAATGFVKKDQLGKNEEGAPQEGILEDMPVDPDNEAYEMPSEEGYQDYEPEA

SEQ ID NO: 674 - protein, 140 aa, Artificial Sequence
  Synthetic Construct
  misc_feature (71)..(71): Xaa can be any beta-sheet destabilizing modification
MDVFMKGLSKAKEGVVAAAEKTKQGVAEAAGKTKEGVLYVGSKTKEGVVHGVATVAEKTKEQVTNVGGAVXTGVTAVAQKTVEGAGSIAAATGFVKKDQLGKNEEGAPQEGILEDMPVDPDNEAYEMPSEEGYQDYEPEA

SEQ ID NO: 675 - protein, 140 aa, Artificial Sequence
  Synthetic Construct
  misc_feature (72)..(72): Xaa can be any beta-sheet destabilizing modification
MDVFMKGLSKAKEGVVAAAEKTKQGVAEAAGKTKEGVLYVGSKTKEGVVHGVATVAEKTKEQVTNVGGAVVXGVTAVAQKTVEGAGSIAAATGFVKKDQLGKNEEGAPQEGILEDMPVDPDNEAYEMPSEEGYQDYEPEA

SEQ ID NO: 676 - protein, 140 aa, Artificial Sequence
  Synthetic Construct
  misc_feature (73)..(73): Xaa can be any beta-sheet destabilizing modification
MDVFMKGLSKAKEGVVAAAEKTKQGVAEAAGKTKEGVLYVGSKTKEGVVHGVATVAEKTKEQVTNVGGAVVTXVTAVAQKTVEGAGSIAAATGFVKKDQLGKNEEGAPQEGILEDMPVDPDNEAYEMPSEEGYQDYEPEA

SEQ ID NO: 677 - protein, 140 aa, Artificial Sequence
  Synthetic Construct
  misc_feature (74)..(74): Xaa can be any beta-sheet destabilizing modification
MDVFMKGLSKAKEGVVAAAEKTKQGVAEAAGKTKEGVLYVGSKTKEGVVHGVATVAEKTKEQVTNVGGAVVTGXTAVAQKTVEGAGSIAAATGFVKKDQLGKNEEGAPQEGILEDMPVDPDNEAYEMPSEEGYQDYEPEA

SEQ ID NO: 678 - protein, 140 aa, Artificial Sequence
  Synthetic Construct
  misc_feature (75)..(75): Xaa can be any beta-sheet destabilizing modification
MDVFMKGLSKAKEGVVAAAEKTKQGVAEAAGKTKEGVLYVGSKTKEGVVHGVATVAEKTKEQVTNVGGAVVTGVXAVAQKTVEGAGSIAAATGFVKKDQLGKNEEGAPQEGILEDMPVDPDNEAYEMPSEEGYQDYEPEA

SEQ ID NO: 679 - protein, 140 aa, Artificial Sequence
  Synthetic Construct
  misc_feature (76)..(76): Xaa can be any beta-sheet destabilizing modification
MDVFMKGLSKAKEGVVAAAEKTKQGVAEAAGKTKEGVLYVGSKTKEGVVHGVATVAEKTKEQVTNVGGAVVTGVTXVAQKTVEGAGSIAAATGFVKKDQLGKNEEGAPQEGILEDMPVDPDNEAYEMPSEEGYQDYEPEA

SEQ ID NO: 680 - protein, 140 aa, Artificial Sequence
  Synthetic Construct
  misc_feature (77)..(77): Xaa can be any beta-sheet destabilizing modification
MDVFMKGLSKAKEGVVAAAEKTKQGVAEAAGKTKEGVLYVGSKTKEGVVHGVATVAEKTKEQVTNVGGAVVTGVTAXAQKTVEGAGSIAAATGFVKKDQLGKNEEGAPQEGILEDMPVDPDNEAYEMPSEEGYQDYEPEA

SEQ ID NO: 681 - protein, 140 aa, Artificial Sequence
  Synthetic Construct
  misc_feature (78)..(78): Xaa can be any beta-sheet destabilizing modification
MDVFMKGLSKAKEGVVAAAEKTKQGVAEAAGKTKEGVLYVGSKTKEGVVHGVATVAEKTKEQVTNVGGAVVTGVTAVXQKTVEGAGSIAAATGFVKKDQLGKNEEGAPQEGILEDMPVDPDNEAYEMPSEEGYQDYEPEA

SEQ ID NO: 682 - protein, 140 aa, Artificial Sequence
  Synthetic Construct
  misc_feature (79)..(79): Xaa can be any beta-sheet destabilizing modification
MDVFMKGLSKAKEGVVAAAEKTKQGVAEAAGKTKEGVLYVGSKTKEGVVHGVATVAEKTKEQVTNVGGAVVTGVTAVAXKTVEGAGSIAAATGFVKKDQLGKNEEGAPQEGILEDMPVDPDNEAYEMPSEEGYQDYEPEA

SEQ ID NO: 683 - protein, 140 aa, Artificial Sequence
  Synthetic Construct
  misc_feature (80)..(80): Xaa can be any beta-sheet destabilizing modification
MDVFMKGLSKAKEGVVAAAEKTKQGVAEAAGKTKEGVLYVGSKTKEGVVHGVATVAEKTKEQVTNVGGAVVTGVTAVAQXTVEGAGSIAAATGFVKKDQLGKNEEGAPQEGILEDMPVDPDNEAYEMPSEEGYQDYEPEA

SEQ ID NO: 684 - protein, 140 aa, Artificial Sequence
  Synthetic Construct
  misc_feature (81)..(81): Xaa can be any beta-sheet destabilizing modification
MDVFMKGLSKAKEGVVAAAEKTKQGVAEAAGKTKEGVLYVGSKTKEGVVHGVATVAEKTKEQVTNVGGAVVTGVTAVAQKXVEGAGSIAAATGFVKKDQLGKNEEGAPQEGILEDMPVDPDNEAYEMPSEEGYQDYEPEA

SEQ ID NO: 685 - protein, 140 aa, Artificial Sequence
  Synthetic Construct
  misc_feature (82)..(82): Xaa can be any beta-sheet destabilizing modification
MDVFMKGLSKAKEGVVAAAEKTKQGVAEAAGKTKEGVLYVGSKTKEGVVHGVATVAEKTKEQVTNVGGAVVTGVTAVAQKTXEGAGSIAAATGFVKKDQLGKNEEGAPQEGILEDMPVDPDNEAYEMPSEEGYQDYEPEA

SEQ ID NO: 686 - protein, 140 aa, Artificial Sequence
  Synthetic Construct
  misc_feature (83)..(83): Xaa can be any beta-sheet destabilizing modification
MDVFMKGLSKAKEGVVAAAEKTKQGVAEAAGKTKEGVLYVGSKTKEGVVHGVATVAEKTKEQVTNVGGAVVTGVTAVAQKTVXGAGSIAAATGFVKKDQLGKNEEGAPQEGILEDMPVDPDNEAYEMPSEEGYQDYEPEA

SEQ ID NO: 687 - protein, 140 aa, Artificial Sequence
  Synthetic Construct
  misc_feature (84)..(84): Xaa can be any beta-sheet destabilizing modification
MDVFMKGLSKAKEGVVAAAEKTKQGVAEAAGKTKEGVLYVGSKTKEGVVHGVATVAEKTKEQVTNVGGAVVTGVTAVAQKTVEXAGSIAAATGFVKKDQLGKNEEGAPQEGILEDMPVDPDNEAYEMPSEEGYQDYEPEA

SEQ ID NO: 688 - protein, 140 aa, Artificial Sequence
  Synthetic Construct
  misc_feature (85)..(85): Xaa can be any beta-sheet destabilizing modification
MDVFMKGLSKAKEGVVAAAEKTKQGVAEAAGKTKEGVLYVGSKTKEGVVHGVATVAEKTKEQVTNVGGAVVTGVTAVAQKTVEGXGSIAAATGFVKKDQLGKNEEGAPQEGILEDMPVDPDNEAYEMPSEEGYQDYEPEA

SEQ ID NO: 689 - protein, 140 aa, Artificial Sequence
  Synthetic Construct
  misc_feature (86)..(86): Xaa can be any beta-sheet destabilizing modification
MDVFMKGLSKAKEGVVAAAEKTKQGVAEAAGKTKEGVLYVGSKTKEGVVHGVATVAEKTKEQVTNVGGAVVTGVTAVAQKTVEGAXSIAAATGFVKKDQLGKNEEGAPQEGILEDMPVDPDNEAYEMPSEEGYQDYEPEA

SEQ ID NO: 690 - protein, 140 aa, Artificial Sequence
  Synthetic Construct
  misc_feature (87)..(87): Xaa can be any beta-sheet destabilizing modification
MDVFMKGLSKAKEGVVAAAEKTKQGVAEAAGKTKEGVLYVGSKTKEGVVHGVATVAEKTKEQVTNVGGAVVTGVTAVAQKTVEGAGXIAAATGFVKKDQLGKNEEGAPQEGILEDMPVDPDNEAYEMPSEEGYQDYEPEA

SEQ ID NO: 691 - protein, 140 aa, Artificial Sequence
  Synthetic Construct
  misc_feature (88)..(88): Xaa can be any beta-sheet destabilizing modification
MDVFMKGLSKAKEGVVAAAEKTKQGVAEAAGKTKEGVLYVGSKTKEGVVHGVATVAEKTKEQVTNVGGAVVTGVTAVAQKTVEGAGSXAAATGFVKKDQLGKNEEGAPQEGILEDMPVDPDNEAYEMPSEEGYQDYEPEA

SEQ ID NO: 692 - protein, 140 aa, Artificial Sequence
  Synthetic Construct
  misc_feature (89)..(89): Xaa can be any beta-sheet destabilizing modification
MDVFMKGLSKAKEGVVAAAEKTKQGVAEAAGKTKEGVLYVGSKTKEGVVHGVATVAEKTKEQVTNVGGAVVTGVTAVAQKTVEGAGSIXAATGFVKKDQLGKNEEGAPQEGILEDMPVDPDNEAYEMPSEEGYQDYEPEA

SEQ ID NO: 693 - protein, 140 aa, Artificial Sequence
  Synthetic Construct
  misc_feature (90)..(90): Xaa can be any beta-sheet destabilizing modification
MDVFMKGLSKAKEGVVAAAEKTKQGVAEAAGKTKEGVLYVGSKTKEGVVHGVATVAEKTKEQVTNVGGAVVTGVTAVAQKTVEGAGSIAXATGFVKKDQLGKNEEGAPQEGILEDMPVDPDNEAYEMPSEEGYQDYEPEA

SEQ ID NO: 694 - protein, 140 aa, Artificial Sequence
  Synthetic Construct
  misc_feature (91)..(91): Xaa can be any beta-sheet destabilizing modification
MDVFMKGLSKAKEGVVAAAEKTKQGVAEAAGKTKEGVLYVGSKTKEGVVHGVATVAEKTKEQVTNVGGAVVTGVTAVAQKTVEGAGSIAAXTGFVKKDQLGKNEEGAPQEGILEDMPVDPDNEAYEMPSEEGYQDYEPEA

SEQ ID NO: 695 - protein, 140 aa, Artificial Sequence
  Synthetic Construct
  misc_feature (92)..(92): Xaa can be any beta-sheet destabilizing modification
MDVFMKGLSKAKEGVVAAAEKTKQGVAEAAGKTKEGVLYVGSKTKEGVVHGVATVAEKTKEQVTNVGGAVVTGVTAVAQKTVEGAGSIAAAXGFVKKDQLGKNEEGAPQEGILEDMPVDPDNEAYEMPSEEGYQDYEPEA

SEQ ID NO: 696 - protein, 140 aa, Artificial Sequence
  Synthetic Construct
  misc_feature (93)..(93): Xaa can be any beta-sheet destabilizing modification
MDVFMKGLSKAKEGVVAAAEKTKQGVAEAAGKTKEGVLYVGSKTKEGVVHGVATVAEKTKEQVTNVGGAVVTGVTAVAQKTVEGAGSIAAATXFVKKDQLGKNEEGAPQEGILEDMPVDPDNEAYEMPSEEGYQDYEPEA

SEQ ID NO: 697 - protein, 140 aa, Artificial Sequence
  Synthetic Construct
  misc_feature (94)..(94): Xaa can be any beta-sheet destabilizing modification
MDVFMKGLSKAKEGVVAAAEKTKQGVAEAAGKTKEGVLYVGSKTKEGVVHGVATVAEKTKEQVTNVGGAVVTGVTAVAQKTVEGAGSIAAATGXVKKDQLGKNEEGAPQEGILEDMPVDPDNEAYEMPSEEGYQDYEPEA

SEQ ID NO: 698 - protein, 140 aa, Artificial Sequence
  Synthetic Construct
  misc_feature (95)..(95): Xaa can be any beta-sheet destabilizing modification
MDVFMKGLSKAKEGVVAAAEKTKQGVAEAAGKTKEGVLYVGSKTKEGVVHGVATVAEKTKEQVTNVGGAVVTGVTAVAQKTVEGAGSIAAATGFXKKDQLGKNEEGAPQEGILEDMPVDPDNEAYEMPSEEGYQDYEPEA

SEQ ID NO: 699 - protein, 253 aa, Homo sapiens
MANLGCWMLVLFVATWSDLGLCKKRPKPGGWNTGGSRYPGQGSPGGNRYPPQGGGGWGQPHGGGWGQPHGGGWGQPHGGGWGQPHGGGWGQGGGTHSQWNKPSKPKTNMKHMAGAAAAGAVVGGLGGYMLGSAMSRPIIHFGSDYEDRYYRENMHRYPNQVYYRPMDEYSNQNNFVHDCVNITIKQHTVTTTTKGENFTETDVKMMERVVEQMCITQYERESQAYYQRGSSMVLFSSPPVILLISFLIFLIVG

SEQ ID NO: 700 - protein, 253 aa, Artificial Sequence
  Synthetic Construct
  misc_feature (109)..(109): Xaa can be any beta-sheet destabilizing modification
MANLGCWMLVLFVATWSDLGLCKKRPKPGGWNTGGSRYPGQGSPGGNRYPPQGGGGWGQPHGGGWGQPHGGGWGQPHGGGWGQPHGGGWGQGGGTHSQWNKPSKPKTNXKHMAGAAAAGAVVGGLGGYMLGSAMSRPIIHFGSDYEDRYYRENMHRYPNQVYYRPMDEYSNQNNFVHDCVNITIKQHTVTTTTKGENFTETDVKMMERVVEQMCITQYERESQAYYQRGSSMVLFSSPPVILLISFLIFLIVG

SEQ ID NO: 701 - protein, 253 aa, Artificial Sequence
  Synthetic Construct
  misc_feature (112)..(112): Xaa can be any beta-sheet destabilizing modification
MANLGCWMLVLFVATWSDLGLCKKRPKPGGWNTGGSRYPGQGSPGGNRYPPQGGGGWGQPHGGGWGQPHGGGWGQPHGGGWGQPHGGGWGQGGGTHSQWNKPSKPKTNMKHXAGAAAAGAVVGGLGGYMLGSAMSRPIIHFGSDYEDRYYRENMHRYPNQVYYRPMDEYSNQNNFVHDCVNITIKQHTVTTTTKGENFTETDVKMMERVVEQMCITQYERESQAYYQRGSSMVLFSSPPVILLISFLIFLIVG

SEQ ID NO: 702 - protein, 253 aa, Artificial Sequence
  Synthetic Construct
  misc_feature (113)..(113): Xaa can be any beta-sheet destabilizing modification
MANLGCWMLVLFVATWSDLGLCKKRPKPGGWNTGGSRYPGQGSPGGNRYPPQGGGGWGQPHGGGWGQPHGGGWGQPHGGGWGQPHGGGWGQGGGTHSQWNKPSKPKTNMKHMXGAAAAGAVVGGLGGYMLGSAMSRPIIHFGSDYEDRYYRENMHRYPNQVYYRPMDEYSNQNNFVHDCVNITIKQHTVTTTTKGENFTETDVKMMERVVEQMCITQYERESQAYYQRGSSMVLFSSPPVILLISFLIFLIVG

SEQ ID NO: 703 - protein, 253 aa, Artificial Sequence
  Synthetic Construct
  misc_feature (114)..(114): Xaa can be any beta-sheet destabilizing modification
MANLGCWMLVLFVATWSDLGLCKKRPKPGGWNTGGSRYPGQGSPGGNRYPPQGGGGWGQPHGGGWGQPHGGGWGQPHGGGWGQPHGGGWGQGGGTHSQWNKPSKPKTNMKHMAXAAAAGAVVGGLGGYMLGSAMSRPIIHFGSDYEDRYYRENMHRYPNQVYYRPMDEYSNQNNFVHDCVNITIKQHTVTTTTKGENFTETDVKMMERVVEQMCITQYERESQAYYQRGSSMVLFSSPPVILLISFLIFLIVG

SEQ ID NO: 704 - protein, 253 aa, Artificial Sequence
  Synthetic Construct
  misc_feature (115)..(115): Xaa can be any beta-sheet destabilizing modification
MANLGCWMLVLFVATWSDLGLCKKRPKPGGWNTGGSRYPGQGSPGGNRYPPQGGGGWGQPHGGGWGQPHGGGWGQPHGGGWGQPHGGGWGQGGGTHSQWNKPSKPKTNMKHMAGXAAAGAVVGGLGGYMLGSAMSRPIIHFGSDYEDRYYRENMHRYPNQVYYRPMDEYSNQNNFVHDCVNITIKQHTVTTTTKGENFTETDVKMMERVVEQMCITQYERESQAYYQRGSSMVLFSSPPVILLISFLIFLIVG

SEQ ID NO: 705 - protein, 253 aa, Artificial Sequence
  Synthetic Construct
  misc_feature (116)..(116): Xaa can be any beta-sheet destabilizing modification
MANLGCWMLVLFVATWSDLGLCKKRPKPGGWNTGGSRYPGQGSPGGNRYPPQGGGGWGQPHGGGWGQPHGGGWGQPHGGGWGQPHGGGWGQGGGTHSQWNKPSKPKTNMKHMAGAXAAGAVVGGLGGYMLGSAMSRPIIHFGSDYEDRYYRENMHRYPNQVYYRPMDEYSNQNNFVHDCVNITIKQHTVTTTTKGENFTETDVKMMERVVEQMCITQYERESQAYYQRGSSMVLFSSPPVILLISFLIFLIVG

SEQ ID NO: 706 - protein, 253 aa, Artificial Sequence
  Synthetic Construct
  misc_feature (117)..(117): Xaa can be any beta-sheet destabilizing modification
MANLGCWMLVLFVATWSDLGLCKKRPKPGGWNTGGSRYPGQGSPGGNRYPPQGGGGWGQPHGGGWGQPHGGGWGQPHGGGWGQPHGGGWGQGGGTHSQWNKPSKPKTNMKHMAGAAXAGAVVGGLGGYMLGSAMSRPIIHFGSDYEDRYYRENMHRYPNQVYYRPMDEYSNQNNFVHDCVNITIKQHTVTTTTKGENFTETDVKMMERVVEQMCITQYERESQAYYQRGSSMVLFSSPPVILLISFLIFLIVG

SEQ ID NO: 707 - protein, 253 aa, Artificial Sequence
  Synthetic Construct
  misc_feature (118)..(118): Xaa can be any beta-sheet destabilizing modification
MANLGCWMLVLFVATWSDLGLCKKRPKPGGWNTGGSRYPGQGSPGGNRYPPQGGGGWGQPHGGGWGQPHGGGWGQPHGGGWGQPHGGGWGQGGGTHSQWNKPSKPKTNMKHMAGAAAXGAVVGGLGGYMLGSAMSRPIIHFGSDYEDRYYRENMHRYPNQVYYRPMDEYSNQNNFVHDCVNITIKQHTVTTTTKGENFTETDVKMMERVVEQMCITQYERESQAYYQRGSSMVLFSSPPVILLISFLIFLIVG

SEQ ID NO: 708 - protein, 253 aa, Artificial Sequence
  Synthetic Construct
  misc_feature (119)..(119): Xaa can be any beta-sheet destabilizing modification
MANLGCWMLVLFVATWSDLGLCKKRPKPGGWNTGGSRYPGQGSPGGNRYPPQGGGGWGQPHGGGWGQPHGGGWGQPHGGGWGQPHGGGWGQGGGTHSQWNKPSKPKTNMKHMAGAAAAXAVVGGLGGYMLGSAMSRPIIHFGSDYEDRYYRENMHRYPNQVYYRPMDEYSNQNNFVHDCVNITIKQHTVTTTTKGENFTETDVKMMERVVEQMCITQYERESQAYYQRGSSMVLFSSPPVILLISFLIFLIVG

SEQ ID NO: 709 - protein, 253 aa, Artificial Sequence
  Synthetic Construct
  misc_feature (120)..(120): Xaa can be any beta-sheet destabilizing modification
MANLGCWMLVLFVATWSDLGLCKKRPKPGGWNTGGSRYPGQGSPGGNRYPPQGGGGWGQPHGGGWGQPHGGGWGQPHGGGWGQPHGGGWGQGGGTHSQWNKPSKPKTNMKHMAGAAAAGXVVGGLGGYMLGSAMSRPIIHFGSDYEDRYYRENMHRYPNQVYYRPMDEYSNQNNFVHDCVNITIKQHTVTTTTKGENFTETDVKMMERVVEQMCITQYERESQAYYQRGSSMVLFSSPPVILLISFLIFLIVG

SEQ ID NO: 710 - protein, 253 aa, Artificial Sequence
  Synthetic Construct
  misc_feature (121)..(121): Xaa can be any beta-sheet destabilizing modification
MANLGCWMLVLFVATWSDLGLCKKRPKPGGWNTGGSRYPGQGSPGGNRYPPQGGGGWGQPHGGGWGQPHGGGWGQPHGGGWGQPHGGGWGQGGGTHSQWNKPSKPKTNMKHMAGAAAAGAXVGGLGGYMLGSAMSRPIIHFGSDYEDRYYRENMHRYPNQVYYRPMDEYSNQNNFVHDCVNITIKQHTVTTTTKGENFTETDVKMMERVVEQMCITQYERESQAYYQRGSSMVLFSSPPVILLISFLIFLIVG

SEQ ID NO: 711 - protein, 42 aa, Artificial Sequence
  Synthetic Construct
YHAGVDKEVVFDEGAGAEHGLAQKIVRGFGVSDVSMIHINLF

SEQ ID NO: 712 - protein, 41 aa, Artificial Sequence
  Synthetic construct
  misc_feature (35)..(35): Xaa can be any beta-sheet destabilizing modification
DAEFRHDSGYEVHHQKLVFFAEDVGSNKGAIIGLXVGGVVI

SEQ ID NO: 713 - protein, 40 aa, Artificial Sequence
  Synthetic construct
  misc_feature (35)..(35): Xaa can be any beta-sheet destabilizing modification
DAEFRHDSGYEVHHQKLVFFAEDVGSNKGAIIGLXVGGVV

SEQ ID NO: 714 - protein, 39 aa, Artificial Sequence
  Synthetic construct
  misc_feature (35)..(35): Xaa can be any beta-sheet destabilizing modification
DAEFRHDSGYEVHHQKLVFFAEDVGSNKGAIIGLXVGGV

SEQ ID NO: 715 - protein, 38 aa, Artificial Sequence
  Synthetic construct
  misc_feature (35)..(35): Xaa can be any beta-sheet destabilizing modification
DAEFRHDSGYEVHHQKLVFFAEDVGSNKGAIIGLXVGG

SEQ ID NO: 716 - protein, 37 aa, Artificial Sequence
  Synthetic construct
  misc_feature (35)..(35): Xaa can be any beta-sheet destabilizing modification
DAEFRHDSGYEVHHQKLVFFAEDVGSNKGAIIGLXVG

SEQ ID NO: 717 - protein, 36 aa, Artificial Sequence
  Synthetic construct
  misc_feature (35)..(35): Xaa can be any beta-sheet destabilizing modification
DAEFRHDSGYEVHHQKLVFFAEDVGSNKGAIIGLXV

SEQ ID NO: 718 - protein, 41 aa, Artificial Sequence
  Synthetic construct
  misc_feature (36)..(36): Xaa can be any beta-sheet destabilizing modification
DAEFRHDSGYEVHHQKLVFFAEDVGSNKGAIIGLMXGGVVI

SEQ ID NO: 719 - protein, 40 aa, Artificial Sequence
  Synthetic construct
  misc_feature (36)..(36): Xaa can be any beta-sheet destabilizing modification
DAEFRHDSGYEVHHQKLVFFAEDVGSNKGAIIGLMXGGVV

SEQ ID NO: 720 - protein, 39 aa, Artificial Sequence
  Synthetic construct
  misc_feature (36)..(36): Xaa can be any beta-sheet destabilizing modification
DAEFRHDSGYEVHHQKLVFFAEDVGSNKGAIIGLMXGGV

SEQ ID NO: 721 - protein, 38 aa, Artificial Sequence
  DAEFRHDSGYEVHHQKLVFFAEDVGSNKGAIIGLMX
  misc_feature (36)..(36): Xaa can be any beta-sheet destabilizing modification
DAEFRHDSGYEVHHQKLVFFAEDVGSNKGAIIGLMXGG

SEQ ID NO: 722 - protein, 37 aa, Artificial Sequence
  Synthetic construct
  misc_feature (36)..(36): Xaa can be any beta-sheet destabilizing modification
DAEFRHDSGYEVHHQKLVFFAEDVGSNKGAIIGLMXG

SEQ ID NO: 723 - protein, 42 aa, Artificial Sequence
  Synthetic construct
  misc_feature (35)..(36): Xaa can be any beta-sheet destabilizing modification
DAEFRHDSGYEVHHQKLVFFAEDVGSNKGAIIGLXXGGVVIA

SEQ ID NO: 724 - protein, 41 aa, Artificial Sequence
  DAEFRHDSGYEVHHQKLVFFAEDVGSNKGAIIGLXXGGVV
  misc_feature (35)..(36): Xaa can be any beta-sheet destabilizing modification
DAEFRHDSGYEVHHQKLVFFAEDVGSNKGAIIGLXXGGVVI

SEQ ID NO: 725 - protein, 40 aa, Artificial Sequence
  Synthetic construct
  misc_feature (35)..(36): Xaa can be any beta-sheet destabilizing modification
DAEFRHDSGYEVHHQKLVFFAEDVGSNKGAIIGLXXGGVV

SEQ ID NO: 726 - protein, 39 aa, Artificial Sequence
  Synthetic construct
  misc_feature (35)..(36): Xaa can be any beta-sheet destabilizing modification
DAEFRHDSGYEVHHQKLVFFAEDVGSNKGAIIGLXXGGV

SEQ ID NO: 727 - protein, 38 aa, Artificial Sequence
  Synthetic construct
  misc_feature (35)..(36): Xaa can be any beta-sheet destabilizing modification
DAEFRHDSGYEVHHQKLVFFAEDVGSNKGAIIGLXXGG

SEQ ID NO: 728 - protein, 37 aa, Artificial Sequence
  Synthetic construct
  misc_feature (35)..(36): Xaa can be any beta-sheet destabilizing modification
DAEFRHDSGYEVHHQKLVFFAEDVGSNKGAIIGLXXG

SEQ ID NO: 729 - protein, 29 aa, Artificial Sequence
  Synthetic construct
  misc_feature (29)..(29): Xaa can be any beta-sheet destabilizing modification
DAEFRHDSGYEVHHQKLVFFAEDVGSNKX

SEQ ID NO: 730 - protein, 30 aa, Artificial Sequence
  Synthetic construct
  misc_feature (30)..(30): Xaa can be any beta-sheet destabilizing modification
DAEFRHDSGYEVHHQKLVFFAEDVGSNKGX

SEQ ID NO: 731 - protein, 31 aa, Artificial Sequence
  Synthetic construct
  misc_feature (31)..(31): Xaa can be any beta-sheet destabilizing modification
DAEFRHDSGYEVHHQKLVFFAEDVGSNKGAX

SEQ ID NO: 732 - protein, 32 aa, Artificial Sequence
  Synthetic construct
  misc_feature (32)..(32): Xaa can be any beta-sheet destabilizing modification
DAEFRHDSGYEVHHQKLVFFAEDVGSNKGAIX

SEQ ID NO: 733 - protein, 33 aa, Artificial Sequence
  Synthetic construct
  misc_feature (33)..(33): Xaa can be any beta-sheet destabilizing modification
DAEFRHDSGYEVHHQKLVFFAEDVGSNKGAIIX

SEQ ID NO: 734 - protein, 34 aa, Artificial Sequence
  Synthetic construct
  misc_feature (34)..(34): Xaa can be any beta-sheet destabilizing modification
DAEFRHDSGYEVHHQKLVFFAEDVGSNKGAIIGX

SEQ ID NO: 735 - protein, 35 aa, Artificial Sequence
  Synthetic construct
  misc_feature (35)..(35): Xaa can be any beta-sheet destabilizing modification
DAEFRHDSGYEVHHQKLVFFAEDVGSNKGAIIGLX

SEQ ID NO: 736 - protein, 36 aa, Artificial Sequence
  Synthetic construct
  misc_feature (36)..(36): Xaa can be any beta-sheet destabilizing modification
DAEFRHDSGYEVHHQKLVFFAEDVGSNKGAIIGLMX

SEQ ID NO: 737 - protein, 37 aa, Artificial Sequence
  Synthetic construct
  misc_feature (37)..(37): Xaa can be any beta-sheet destabilizing modification
DAEFRHDSGYEVHHQKLVFFAEDVGSNKGAIIGLMVX

SEQ ID NO: 738 - protein, 38 aa, Artificial Sequence
  Synthetic construct
  misc_feature (38)..(38): Xaa can be any beta-sheet destabilizing modification
DAEFRHDSGYEVHHQKLVFFAEDVGSNKGAIIGLMVGX

SEQ ID NO: 739 - protein, 39 aa, Artificial Sequence
  Synthetic construct
  misc_feature (39)..(39): Xaa can be any beta-sheet destabilizing modification
DAEFRHDSGYEVHHQKLVFFAEDVGSNKGAIIGLMVGGX

SEQ ID NO: 740 - protein, 40 aa, Artificial Sequence
  Synthetic construct
  misc_feature (40)..(40): Xaa can be any beta-sheet destabilizing modification
DAEFRHDSGYEVHHQKLVFFAEDVGSNKGAIIGLMVGGVX

SEQ ID NO: 741 - protein, 41 aa, Artificial Sequence
  Synthetic construct
  misc_feature (41)..(41): Xaa can be any beta-sheet destabilizing modification
DAEFRHDSGYEVHHQKLVFFAEDVGSNKGAIIGLMVGGVVX

SEQ ID NO: 742 - protein, 42 aa, Artificial Sequence; identical to SEQ ID NO: 207
  Synthetic construct
  misc_feature (42)..(42): Xaa can be any beta-sheet destabilizing modification

1-38. (canceled)

39. A pharmaceutical composition for treatment of Alzheimer's Disease, comprising a non-aggregating peptide analogue of the Aβ42 peptide, the Aβ42 peptide having an N-terminal domain corresponding to positions 1-28 of SEQ ID NO: 1 and a beta-sheet aggregation domain corresponding to positions 29-42 of SEQ ID NO: 1,
wherein the N-terminal domain of the analogue comprises an amino-acid sequence differing from residues 1-28 of SEQ ID NO: 1 by no more than 3 (preferably 2, more preferably 1, most preferably 0) deletions, insertions and/or substitutions, preferably conservative substitutions;
wherein the beta-sheet aggregation domain of the analogue comprises an amino-acid sequence differing from residues 29-42 of SEQ ID NO: 1 by no more than 5 deletions, insertions and/or substitutions; and
the non-aggregating peptide analogue substantially retaining native function of the Aβ42 peptide except for being non-aggregating.

40. The pharmaceutical composition of claim 39, wherein the retained native peptide function comprises capability of enhancing or inducing a7 nicotinic acetylcholine receptor (a7nAChR) mediated Ca²⁺ influx.

41. The pharmaceutical composition of claim 40, wherein the retained native peptide function is the capability of enhancing or inducing a7nAChR-mediated Ca²⁺ influx in cortical neurons at <3000 pM concentration, at <300 pM, at <30 pM, or at <3 pM.

42. The pharmaceutical composition of claim 39, wherein the beta-sheet aggregation domain of the analogue comprises an amino-acid sequence differing from residues 29-42 of SEQ ID NO: 1 by no more than 5 deletions, insertions and/or substitutions, preferably conservative substitutions.

43. The pharmaceutical composition of claim 39, wherein the beta-sheet destabilizing modification comprises substitution of a naturally occurring amino acid residue of the peptide with an amino acid analogue.

44. The pharmaceutical composition of claim 39, wherein the beta-sheet destabilizing modification comprises substitution of at most three naturally occurring amino acid residues at three separate positions relative to SEQ ID NO: 1 with an amino acid analogue.

45. The pharmaceutical composition of claim 39, wherein the amino acid analogue is one of: 3-hydroxyproline, 4-hydroxyproline, selenocysteine, pyroglutamic acid, carboxyglutamic acid, octenyl alanine, pyrrolysine, palmitoyl aspartate, D-amino acids, b-amino acids, y-amino acids, Homo-amino acids, b-Homo-amino acids, a-methyl amino acids, N-alkylated amino acid derivatives, pyruvic acid derivatives, branched-chain amino acid derivatives, nitro amino acid derivatives, halogenated amino acid derivatives, ring-substituted amino acid derivatives, aromatic amino acid derivatives, linear core amino acids, peptoid derivatives, hydroxylated amino acid derivatives, cyclic amino acids, bicyclic amino acids, 3-amino-3-aryl-propionic acids, 3-amino-4-aryl-butyric acids, amino acids with aromatic spacers, alicyclic amino acids, a-phenylglycine derivatives.

46. The pharmaceutical composition of claim 39, wherein the amino acid analogue comprises an N-alkylated amino acid analogue, preferably with 1-3 carbons in the alkyl moiety.

47. The pharmaceutical composition of claim 39, wherein the beta-sheet destabilizing modification comprises a substitution of M35, preferably with an amino acid analogue.

48. The pharmaceutical composition of claim 39, wherein the beta-sheet destabilizing modification comprises a substitution of M35 to proline, N-methyl methionine or pyrrolysine, preferably N-methyl methionine.

49. The pharmaceutical composition of claim 39, wherein the beta-sheet destabilizing modification comprises one or more of:
replacement of G29 with methyl glycine or N-ethyl glycine;
replacement of A30 with N-methyl alanine or N-ethyl alanine;
replacement of 131 is N-methyl isoleucine or N-ethyl isoleucine;
replacement of I32 with N-methyl isoleucine or N-ethyl isoleucine;
replacement of G33 with N-methyl glycine or N-ethyl glycine;
replacement of L34 with N-methyl leucine or N-ethyl leucine;
replacement of M35 with N-methyl methionine or N-ethyl methionine;
replacement of V36 with N-methyl valine or N-ethyl valine;
replacement of G37 with N-methyl glycine or N-ethyl glycine;
replacement of G38 with N-methyl glycine or N-ethyl glycine
replacement of V39 with N-methyl valine or N-ethyl valine;
replacement of V40 with N-methyl valine or N-ethyl valine;
replacement of 141 with N-methyl isoleucine or N-ethyl isoleucine; and/or
replacement of A42 with N-methyl alanine or N-ethyl alanine.

50. The pharmaceutical composition of claim 49, wherein the beta-sheet destabilizing modification comprises a replacement of M35 with N-methyl methionine or N-ethyl methionine.

51. The pharmaceutical composition of claim 39, having the amino acid sequence of one of SEQ ID NO:3, SEQ ID NO:88, SEQ ID NO: 100, SEQ ID NO: 190 or SEQ ID NO: 192 with at most three conservative amino acid substitutions in either or both of the N-terminal domain and the beta-sheet aggregation domain.

52. The pharmaceutical composition of claim 39, having the amino acid sequence of one of SEQ ID NO:88, SEQ ID NO:100, SEQ ID NO: 190 or SEQ ID NO:192.

53. The pharmaceutical composition of claim 39, wherein the pharmaceutical composition is a subcutaneous, intravenous, intracerebroventricular, intracerebral, intrathecal, intraperitoneal or intramuscular; topical, nasal, oral (including sublingual or buccal), rectal, ocular or otic pharmaceutical composition.

54. A method for treatment and/or prophylaxis of Alzheimer's disease comprising administering to a subject having or at risk of developing Alzheimer's disease a non-aggregating peptide analogue of the Aβ peptide, the Aβ peptide having an N-terminal domain corresponding to positions 1-28 of SEQ ID NO:1 and a beta-sheet aggregation domain corresponding to positions 29-42 of SEQ ID NO: 1
wherein the N-terminal domain of the analogue comprises an amino-acid sequence differing from residues 1-28 of SEQ ID NO: 1 by no more than 3 (preferably 2, more preferably 1, most preferably 0) deletions, insertions and/or substitutions, preferably conservative substitutions, and
wherein the beta-sheet aggregation domain of the analogue comprises an amino-acid sequence differing from residues 29-42 of SEQ ID NO: 1 by no more than 5 (preferably 3, more preferably 1, most preferably 0) deletions, insertions and/or substitutions.

55. The method of claim 54, wherein the non-aggregating peptide anal SEQ ID NO: 16 to SEQ ID NO:193.

56. The method of claim 54, wherein the method further comprises:
determining a concentration of Aβ42 in a sample of cerebrospinal fluid of the subject;
and
confirming that the measured concentration of Aβ42 in the cerebrospinal fluid sample is less than about 500 pM, preferably less than about 400 pM, preferably less than about 300 pM, more preferably less than 200 pM, identifying the subject as a candidate for treatment and/or prophylaxis of Alzheimer's disease prior to the administration of the non-aggregating peptide analogue of the Aβ peptide.
